United States Patent Application Publication US 2026/0191916 A1 - sequence listing, part 73

SEQ ID NO: 541 - DNA, 5107094 bp, Hungatella hathewayii (residues 1-1,702,365 of 5,107,094)
  source 1..5107094: mol_type = genomic DNA
gcggcgggcatggaggctctgggggataaggtggttgcggaggccacggcggttgcggaggccacggcggttgcggaggccacggaggctgtggaggccacggcggttgcggaggccatggcggttccggcggataaggcggttgtggaggctgcggtggatacggcggccacggacctaccggaggaaatggccagccgggataaggcggaagtccccaaaaacagggaggaaaccatgggaagccattgtttccgccaccgttgttgctgctgttattgttattattattgttattgttgctattattattattgttattattgtttgtactattgctgttattatttgttatacaaattcctccctttcctgaagaaccggaattgtgcatactgggatttacgatgcatacacatatggaggcggttgttgtgaccgggtaatcttctaacgtagctccgattggctgatagttaagcgtggtctcggcagtcggatccataagaacaacgcgggtaacagtgccggaaagagaggcattgacacggaagcacattgcgttatgaaccaggcgcagtgcaatataaaattcctgaccaacggctggggacgtaatgggatttccacaaaaatccataaagcttgcagaaaaatcctcgccgcagtcacagaaggtttcaatcgttaaaacgggagtgcctgtaaggctggatctcaaagagaacggtcctacgagcagccgtccgcagacatttcgtatctcactgggacagccgtggaaaacgagatacgattctgacggattggagggaatggttccggtgttgcagcaataaataaattcctgacggcagcaggaggcgccggtccccggaggataggagtaggtgggctgggcagctgtatcggcaaaattacccgccatttcgatcagacgcagtacagtctgattcagcctgtcggattttggatgagcagcaccgtcagaacaattcaaaaatactgcttcagacggtgagatctggcctaaaagcacccagatggctacctgaacggctgcgtaggcatcgttgttgtccagaggtggagccgccgtatcatcgactccgaccaggttaaaggtctgggaggcggaaaccgtcggataggcatttgccagaatccatgcgagcatctgtttctggcgctccgtggcatccggaaacagggtctcaaaagtctgactctggtaaggcacgtcaccgtatggtccatctttaaatttatcaaggcagtaggctggtccggtggttccgttagctgtgaacgtaaatctgaaaatctgattgtgatcgtcgcggtttaaccgatatctggaagcttccgtgtccggaagcgcgcagtaacttcgtacttcgggatctccggtagcggttcccgtcaaatcggttcctgtatataaaataaacggccgtgaagaaggcgtgacggtaccggacggtcctgtcactgcgatctgtgtgcccggtgagttgggggcagccggggagatatctgtattactcattctatatcctccttatcaatggaatatgagcctgcagggatttgtcctgcatattatagagtatgacaggctcttccagtatgttccggtattggttttgggctttcgaaagtccgtaaccggaagcgtccggttggactgcggcgccccgggcaggggttgggcaaaaaactcattccaatggcataaatttaaataccatgaaaaagactgtcaaaagccattggaatgtgttataatagagataaatcaaaattgatgctttggatgcattctcttctgaagcgtcttttttttgttctcagacgcaatgctgtctctgaataatcgatttggcggtatctgttggtttgtttcaaaggaggttaaaatgtttcaggtaaatgatcatgttgtctatggaaactatgggatctgtgtggtgaaagcgataggaagtctggagatggattctgtagtgaaagaccggctttactatacgctggaaccgctgtattcggagaaaaatacgatctataccccggtggataaagaagattccatgcgatgtgcgataacggaacaggaggcatggaaactgatcgatgggatacaggcacaggagatgatacaggttgcagatgagaaaagagcggaacaggcatatagagaaattatgagaacgaatgagtgcagtggctggagcagaatcataaaaaccatatatctaaaaaacaggaaacggttggcggaaggaaagcggtatacagcaaaggatgatatctatttacggcttgccgaggactttctgttccgggaactggcggctgcgctgaaggttaaaaaggaagatgtggaatcaattatatcagacagggtaaaacaactgggctgagataatgcggctgtctgctgaatgacagccgcgtttctttttgataaaatattctgcagcggatcggctgccggaagtgaacgctgaactgttacagaaaaacaatttctgtcaacttttttaatggcaaaaaagcgaaaggcatggtaaaataagaataattgtgtgcagtcagacgcctcgcagtaagctgcgggggatttgacactgcaaatggctgccgggaacatgcttgtatgcccacaggggccgccgcttatgcgggaatcaacaaaagtcgaaacagagggacaagaacaatgaggtttatcggaagcaagacattgctgctggatcatatcagagcggttgcagaggagaaggcgccggacgcccggagcttctgtgatattttttcgggaacagcagctgtggcgagatattttaaacagtggtatgaggtgtattccaacgatctgttgtatttttcatacgtactgcagcgtgccaccatagagaatgacagtataccggaatttgaccggctgaaggaagaactggggattacggatccggtggagtactttaacggaaaagaaacccgggatatggagagcttagagcagaagagacgtttttttcagaatacgtacgcgcccaccggcggccgcatgtatctaaatgatgacaatgccctgcgcattgattatgccagatgtaccgtggaggactggaagactgcaggactgctgaatgagaatgaatactactatcttgtagcctgtatcgtggagggaatcccatttgtatccaatacctccggtacgtacggtgcgtatcataagagctgggaacggcgcagctataagagataccagctgttccagctggaggtgacgacgaatcacaaagaaaaccgctgttataacgaggatggggccgaactgttaaagcggctgcagggggacatcctctacattgacccgccttacaacgaacgtcagtatcttccgaattaccatgttctggagactgcggccaggtatgactatccggaggtgaccggcgtcacgggacagcggccctatgagaatcagaagtcggaattctgtatgaagaagaatgtgaccgatgcctttgaacggctcatcagcaatgcacgttttcagcatattatcttaagctacagcacggacggtctgatgacgactgaggatattgaaagaataatgaagatgtatggaaagccggagacctttcacatttatgaaattccgtaccggagatataagagcagaaaggtcaaagagacagagcgcttaaaagagctgattgtatatgtagaaaagcaggtggaaccatgtatataaagagcccgctaaactataccggaggcaaatacaaaatattaaaaccggttctgggcgcatttccgcggcagatcggcagttttgtggatttatttgccgggggctttaatgtgggaattaatgtggaagcggaccgtattttctgcaatgaccagattacttacttaatcggtatgtacgatatgttccggaagacggatacggaggtgcttcttacaagaatccgcagcctgattggttcgtatcagctgactcagcagaataaggaaggctattatgcgctgagacggcattataatgagagcagggatttgacagagctgtttgttttgacctgctatgcgtttaaccatcagattcgttttaataacagccatgaatttaactctccctttggaaaaaacaggagctcctttaatggaacgatcgaaaaaaatttaacagcattctgcagggccttaaaggaaaagaatatttccttttctaccacagatttccgcgagatgaatctggattttttgggagaaaatgatttaatatactgtgatccgccttatctgatttccactggctcctacaatgacgggaaccgcgggtttaaagactggcacgaggaggaggaggaggctctcttaacacttctggaccggttaaatgagcagggaacgagatttgcactctccaacgttctgtatcataagggactttccaacgatcttctcatcgactggagtaaaaaataccatatcacctgcatcgataagagctacgccaactgtaactaccattttaaggacagagatgcggtgactgtggaggtgctgattactaattatgtgccggaaggcatggaggaatagaaagcgtcactttgattagctgagccgtagaatcaggcatggataatcaaagcggcgctttttctattgacatttcctgtgttgtcttctataattacattaacgataacattaacgttaatgtaagaggagtgaaaatgagagaaggagtcgttttcgatgtagaggagtttactgttttcgatggtccaggccttcggcagactgtgtttttaaaaggatgcccgttaagatgcagctggtgtcataacccggaggggctgagtggggttccccagttgatggtaggtacggcgtcctgcaccggatgtgggaagtgcagggaggtgtgcagacataagacgtgtattagctgcggggaatgcattccggtgtgtcccctgcatctgagacggattgccggagagaagatgacatcagaggagctgatcctcaggatccgaaagagcagtgattactatgccaggtatggaggcggagttacattttcgggtggagagccgcttatgcaggcggaatttttaacggaagttttaagcgggattccagaggtacaccgggcggtagaaacctctggatactgtgaagaagacgtttttcggaaggtgatcgcccatctggattacgtgatgatggacattaagatgtttgatgcggttcttcacaaaaagtatacaggagtggataataaaaaaattttggggaatgcccggattctctgtgcgggagagattccgtttgtcatccgtatccctctgattccgggagtgaatgacaacgaggagaatttcaggagtactgccaagtggatcgcaggggcaaaggcgcttataaaggtagagcttctgccataccataagacagcaggcgctaagtatgctatggtaaagaaagaataccggccggcgtttgatccggaacaaactgtttgggtgtcgcagaaagtatttgaagaatatggaataaggagcgaggtattatgacagagaatattgaaaaaatgcgtcagttttttgtagtggataagggacagaaggccatgtggcaagaaccggaggacccttatattttagcagaacagtttgcggcagaacagataccggatgtggatcgggcagccaggaggctgatttatgtactggataaagaagagcccgtcttatttgagggagagcggatcgcgtttaccagaacggtgacgacgataccggagatctttacagaagaggagatgagagatttaaaaaagacacactggatccatgagaagggtgatgtgtgcaatatcagtgtcgactatacgaaactgctgaatcagggattttatgcaaagaagacggagctggaagctcttagggaagaatttttccagcgtggtgagagagaaaaagctcattatcttcagctgcagattgatattctggatcacgtactttcccttgcatccagatatcagaaattggctgaacagagggggaatgaagtggttgccaaaacgctgctgtctgttcctgcacacgcaccgcagagttttctggaggcgctttctatgtttcggattatccattttaccatgtggtgcgggaggaactaccacaacacagtgggccggtttgatcagtatatttatccatacttaaaggctgatctggataaggggatacatacgaaggagagcgcgctggaactgctggaagaattctttttaacctttaaccgggacagtgatttatatccgggcatgcagcagggggataacggacagagtctggtgctcggaggattaaatgaagatggtacagacagctacaatctcttgtcggaattgtgtttaaaagccagcctggagctgaaggtgattgatcctaaaatcaatctgcgagtgcacgaaaagactccgctagatacatatatattggggacacagctgacaaagcaggggcttggattcccgcagtattccaatgacgatgtggtgattccggggcttatggagctggggtatgagaaaaaggatgcttaccgctatgtagtagccgcctgctgggaatttatcattccaggcacagccatggatattcctaatatcgaagctctttctttcacaaaggctgtctccgacgctgtcatggagaaactggagcagtgccgctcctatgaaaagtttgaggaggcggtaagaaacaagattaatagtcaggttgaagcattatgtaaacaagtgaatggggtctatctatatccagcgccgtttttatccctgatgatggaaggctgttgtgaaaaaggaattgatgtgtccctcggatgtaaatataacaattacgggttccatggaacaggaatcgccacagcggcagattccatggcagccgtgaaaaaatttgtgtatgaggaaaagagcacggatgccctcagtctggttaaggcccttaagaatgattttgagagcgacgagctgctttgtaaccggctgcgctatgaatctcccaagatgggaaatgataatgattacgtagatgggatcgcggtccggctgctgaacatttttgcagattccttaaagggaagaagcaatgacagaggcggtatttaccgagcgggaacaggatctgccatgtactatattcgtcatgccgagaatctgccagcgactccggatggaaggcgcaaaggagaggggtttggtgcaaattactcacccagcctgttttccagatgcagaggtcctgtgtcgattatccagtcttttaccaaaccggatttgaaacgggtaattaacggaggacctctgacgctggaacttcatgacaccgtgttccgaacagaggaaagctgtgccaaggtcgcggtgctggtaaagtcttttatggatctgggaggccatcagcttcaattgaattccgtgaaccgggacactatgttggaagcgcaaaaacatcctgaaaattataagaacctgattgtacgggtgtggggctggagcggctattttgtggaattggataaggagtatcaggatcatattatccagcggatggagctgatgctggctgtttaggaggaaagctgccagatagctgctgttctttacgcatttcttaccgattcatttttttgccctatatcacagggaagtctgacaaatgctgtagttcctctgtctggtttgctggtaatcgtaagggtatacttgtctccatagagcagtcgcagcctgtcgttgacatttttcatgccatagccgctcgtctgtacggaaaacagatgttctacagcttccttttccatgccacagccgttatcctcaatccaaatagagataaaatctactgccatgtactcttctttttttacggtgacagtcagctttttgtccttcttcagactgttctttaagccatggtccagcgcattttccaccagtggctggagaatgaaattgggaaatggaacgccggctaaggcctcctcgatgttgtaaacaacttcgatggactcgctgtaggagaagagctgaatctttacataggcctgaatattcatcagttcattttcaagtgtagtgatatcttttcctttattcagcgcagtgcggtaaaacgtggacaggagaatgaccatttcgctgatatcgttctgcccggacagaatcgcacggctgttgataagtgataaggaattataaagaaaatgtggattaatctgtgcatacagaattttttgttgataattcttcttttccagctcgtgttttaagtttaccataatatagtgattgatttcccccatcatacgtgaaaatgtttgaaaaagcgtgccgatctcatcgtggcgtgaactacccagggaaaccgacagatcattcatatctccggtacgcacctcgtcgatcttctcagtcagattttcgatgggggtgacgatagaaactgagatgattaagaccatgactccgaggaacagaaggataatccagccaaaggcataagtaccgcgggtaatcgcattgactgcactgtggatggaggtgtaagtcttatagtaacagatattccagcctgtctccggtatggaggaagtcagttttaagtaccgggtatcagataaatcagttagaaatgctgtcagttcctccctgggaagatcagaggtggaaaagatcagacttccatcctgagccgtaactgcaacatcgtatttgtcctccgagagagataaaaacggttcaaagaacatatcataattaattcggaaggagaggtaatttgaactcttgtactgcctgatatctccaattagtctggtggagtaaagatatggtttgccgtcttccacggcagagacccaggtaggaatatactggttatgtacctggggaaaccattccttctgatacaggctgtccagacccaaaatataattattataaggatgaatatcaccggaagagtaaattgtgatagcctccagatccggatacagggcatagtaggtgagaaaaagaggttcaatggtgtcggaataagccttgtacatttggaaataatcgtcatgatagctggtatttaataccttcataatagcattattattaaacatgaaattagaaagattattataagtgattagcttattgtctacagaactgactgcctgctccagtgcaagttcggtcagggaccgctctctttccaggatgatccggttggtatagcgattggaaaggatgatatagcacaggaacggaagtgcacctaccagcagaaagacgatcaggacttttctgcggatccccatgtccagaaagccccttctgattcgttttagagtatttaccattagtaagtctccttctggcggtaattttccggactttctccatagtagtcgcggaaacgctgggaaaagtaggagggattggagaatcccacggtttcagctattttgttgactttcatctctgtctccaaaagcagttttgcggcctgttccagtcggtattcattgataaatttcatcagattacatcccgtctcttttttaaatacggagcaaagataattgggacttatgtaaaaatggctggagatatcatttagagacaatggctgggtgtaattctgatagatatactgccggatcttatctgatttcagacagcttccctgatttttctgcgtctggctgagcagttttttggcctgactgcaggtcatgtccatcagttccacgatgtttgcagaactatagattttttctgccactttgtttaaatccggcttttgatcgtctggaaggtaatggattatttctttcatcaactcggtgaaacagtacttgacgaaaatcagggagtgggttttctcatgctttaaagattcaaagagatcctccaaatgatgcatcagggagtcataatccttcaggcgcagatcatcggatacgatatcaatggaaatatgaccggaggcagcgtaagggtgatccggaccatccggcagaaaaatgttttgttctggaaagaaaaagtgattctccaaccgtttttccagctgtgtataaatctggcttatggaactgttgtcagggagatcctgaaacgccacacagcatttctgattgaattctttttcagcacataaacatacagcctgtgcacaaggaaagagaaatgcctcctccttaaagaacagaatgcttcgggctggatcaagattcagatagtcaaaagggacagtgaggatgccttccagtttttcctgaaaggatatgccttccagactgaaaaattcattgctgcattcgattagcataaggccggtataacgatccttaaaaaatgaagaactgtctgcaggcgtaccattttttccattgacagccagccatagcatatgattttttaaaagtctggtctcactgcggcgtgtctggatctggcggttagtctcctctactccgttaataacgcgagtcatgacagaaacgaattcatcaggaatgaccggtttcatcagataatcttctacgccaatggtgatggcggttttggcatattcaaaatcattaaagccgctgaaaatgacgattcttgtattcggtgaaagctttctcacctctttggacagtcccaggccatcgagaaatggcatacgaatatccgtaaaaagaatatcaaaatgattttcagggttctgaaagagtcccagagcctcctggccatttaccgcggtggcaacctcaagaggcagttcgtatttattaataagaaatgtgatgcagtcaacatcgagaacggaatcatcgacgactaaaatctgatacatggctaacactccttccattcatgtaaatctataaatttattctagcagattttccagcaggataacagtggaaggccataaaagggtaattttgtgataggaatgcgaaaaaccttgtatatacagggaaaataccagaggatataataaagacatgaaataaatcgctgcttaaggcgccgtaagcagcaggggttgaaaactaattataatggaggttaccatgaaaagaaggaaaaaattagtatcactgctcgtgaccgcatgtatggcagggggctgtatggctggttgtggaggaaatacgaaggcaccggaagattcttctgtcaagactgaatcaacaacgaaagatgctgcgaaagagtcgaatgttcagtcggccgctgtcacagaggaggtagatccttacggtccggtaaatgaggagacaactgtgattcatgtgggaagagcggagtcagccaatgttacgtatccggacggtgaggattcccataacaactatattgtaaaatatcttcaggatcaattaaatacagaatacatatatgatttttccgtagatgacgcctcatatccaacgaaggtcgctatggccatcgcatcgggagacatgccggacgtcatgaatgtaacatacactcagctggttcagctggtcaatgccggtgcggtggaggatatgacggaagcgtttgcaacttaccgctccgatgcattgaaaaaatgttttgattccactaatggtatgtcggaaggtcttgcgacctttgacggaaaactgatggcaattcctgatattcagccaggtatggacagtgtacctcttgtttatatccggggggactggatggaagaattggggctggaagagccaaaatcattggacgacattgtgaacattgcaaaaacctttatggagaagaatccaggtggcaatgtgacagatggaattgcggtagggctttcttccgataaaaaactggttcagaagaacggaggaacgtggcatataaatggactgtttaccttatttgatgcctatccgaagatgtggatcaaacaggatgatggctctgtggtatacggttccatcacagaagaggctaagacagctcttggagagatcagaacgctggtggaagagggggttatcgatccttcttttgcagtcagagactccgaacagtgtgtggaaatgatcagcaatggccaggcgggtattttctttggcgcatggtggtcgaaccagtggccggtggtatccatgctggaaggtgcggatgattctgtaaaatggaattcttacgtagctcctttaaatgcggaaggcaaactgaacgtccccatgaagagtccaaccactacctacattgtagtaaagaaaggctgttcagaagatatcaaggaagcggtcgtaaagacgattaattatcagtatgatttagatcagtctcaggcagagaatgtccggcccaatggtatggattccccattctcctggcactattatcccatcaatgttcttcactgtgattatgatgccaaggaaaaacagattcagtctgtgatggactgtattgacggaaaagtggcttacgatgatttaagcggcgatggaaagacatggtacaacggatataccgcagttcagaaagacggcttcagaaagactgtagagaaaaatatttctactgcgaatggctggggatgggccaatggtgcctggaccgtacagagtcaggcggataagctaaatcttcagtatgcggccagctatgcggattctccttctatggaatccttatgggcaaccttagagacgcaggaagatgaattttatttacaagtcctcactggaaacacaacgattgacgaatttgataaatttgtcagccagtggaaggcactgggtggtgataccattacgcaggaaatgtcagaactggctggcgccaactaggagatctcagcaaatgaggaatggaaaaccggaggtcaaaaacctccggttttcaaaatcgggaagagcaggcattcccaattacagggagttcaaaaaggaaggaagtttcgtatgggaaaagtagcaggaaggaagagaagaagaaaggaagggagacacgtaaccataaggcagacataccaatatcatctgctgatgctgccgggctttgctatattgtttatttatacgattattccgtttttcggaaatatcatggcatttcagaattatcagccgattatgggatttttaaagtccaaatgggtggggcttgccaatttcaagcacatgctgctgttgcccgatacggccagaatattccggaactcgttcaccatcgcagtggggaaactggtactcacgatggtgctgtccatattcttcgccattcttttaaatgagatcaccagcgtaaagtttaagaaatcggttcagactatctgttttttgccgcatttcctgtcatgggtaattctggcgacgatattcaagaatcttctggacacaggaggaatcttaaatcagggccttatgagcctcggaatcttaaaagaaccgttaatgttcctcggatccaataaactgtttcagggcgtggtgatcagcacagatgtgtggaaggagttcggctacggggccattatcttcattgcagccctcatgggcatcaacccggaactctatgaagcggcctcggtggacggcgcaggcagactggcgaaaatatggcatattacgctgcccagcatccgcgtcaccattgtcatggtagctaccttaaatatcgccaatatcttaaacgctggcttcgaccagatctataacatgtacagtccggtcgtgtaccagagcggagatattatcgatacatacgtataccggttgagcttcatcaacgcccagtactcactggccaccgccatcgggctcttaaagtcggcgatcagcttcattatgattgtcacggcgcataagctggcaaagaaatttgccaattatcagatcttttaggggggataaaccatgaaaaaatataatacgtggcagaaccgtttgtttgacttctgtgtctttctgcttctgcttatcctggggctcagctgtttaatccctcttttgcatgtcattgcactgtcactcagcagcaaaacggctgccctgtcggggaaggtgacactctggccggtggagctgacctttacaccgtacaaggtcttaatgactgatcacaagtttatgcaggccatgtggatttctgtacagcgggtagtcttaggcggtgcgatcaacctggttctgacggttatcactgcatttgccctttcccaggacgaaacggatttcccggccagaaaagtgtatatgtggttcatgatcttcgccatgctgttcggtgcgagtctcgtcccatggtacttcgttatcaaggcgaccgggcttatggataccatatgggcgctggtaattcccggagcacttccggtttacaacaccattctcctgatgaacttcttcagaaatcttcccaaggagatcaaggagtcggccatgctggacggaatcactccattccagatgatgatgcgtatcttcgtgccgttagccaaaccggcgatcgccactgtgaccgtattttccgtggtgttccactggaacaacttcttcgatggccttctgctgatgaatacgcccagcaatatgcctttgcagacctatatccagactttgaccaatacgacggtcagcgtcatgagttcctcattaactccggcggaaattgaagcgcttacctcgcttaaaacgtttaacgcagcaaagattgtcgtggcgtccctgccgatcgtaatattctatccatttatgcagaaattcttcgtctccggcctgacgctggggtcagtgaaagagtaggcttatcaaataaaggagatttaatcatatgagaatcaatcgcatggcaagcgtgcccctgctggtgcacgacccctatttttccatctggtcatcggccgactgtctttatgatgcggacacggcacactggagcggaaaggaaaaaagactttacggccatattaccgcggacggagaacggttccgtttcctgggcggtgaggatggttatccggtcattccccagacaagcctggaggtcacaccgactgcgaccacatatacctttgaaaatgagaagctgaggcttttcgtccgtttcctgtcaccgcttctgcctgaggatccggttctggtctccagaccgtgtacctacgttgattttaccgtaagcaggaaacaggaggtctccgtgaagatcgattttactgttaccggcgatctggtcttcgatacgccgggaaaaatcattggcggaagccatgaaaatgagacgtatcatttccattacggtactatgagaaaggcattccagacgcctttaggccacagtggggaccggatcaccatagactggggcgacatgattctggcttcagaggacgaggctgtcacagtcttcttcgatccggagtacagcctgctgaaggcatctgcggagttgggtaccgatcagatggcgtgtacggtgatcgccgcctatgatgatctgctctcgattttttacttcggttcctggcagaaggcctattggacgacgacgtatgaaaccattttcgatgcgattggagaaagcttccgcgatcgggaagaggtgactgaaaaggcgcaggcatttgaccggagtctggaggaacaggccaggaatacaggcggggacgactacgcgtttctatgcagcatctcctaccgccaggtcatggcagcccataagctgatcgcggaccaggagggaaatctcgtcttcctttccaaagaaaatgattccaacgggtgtacggggaccgtcgatatcagctatccatctgcccccatgttcctgctctttaatctggaatatgtgaaggccatgctgcggcctgtcttccgttttgccggctgtccggtgtgggagtacgactttgcgccgcatgatgtgggacgctatccgtacgcggcaggccaggtctacgggcttagcaaagaaggagaaaaccgggaattttgctgcgataacggtgctattttcccattttactacgagtatcccgcgggactgtccgtctatgatgtgagggaccagatgccggtggaggaatccggcaatatgatgattttaacggcggcagtgtgtgaactggaacgttcgggagcatttgcctcgccgtattacgaggtgctgaaaacatgggccgggtatttgctcgcatacggtgaagatccgggagaacagctctgtaccgatgattttgccggccatctggctcacaacgtaaatctttcggctaaggcggttatgggaattgaggcattcagcagaatttctgcctgccttggaaaggaagaggaggcgaaacggtaccatgaggcagccgtgaggatggcacagagttgggagacgcgcagtgacgccggcgatcactaccgcctgacctttgactgtgaagagtcctggagcctgaaatacaatctggtgtgggatcatttcttcggaagcggtctctttaaaccggaggtatttgagaaagagaccgcattttatttaaagaagagcagcaccttcggcgtgccgttagacagccggaagacgtatacgaaaagcgactggattctctggtgtgccgcatttgcacccgatcgagacgcattataccgtctgatggctccggtagcggagtatgcaaggtccacagaagaccgggtaccgttttctgactggtatgatgcggagagcgggagatactgtcattttataggaagaagcgttcagggaggcatatatatgccgatgctgatagagaagaggaagattaaacaggaggcttaaagcatgaaaaaagcggtaattaagattgacaaagattataaaatcggcccgatcgacaaccggatctacggtaatttcatcgagcacattggcagagcggtctatgggggaatctatgatccgggccatccgctggcggatgatatgggatttcgaaaggatgtgatcgcgctcacaaaggaactaaaggttcccattgtgcggtatccgggcggcaattttgtctccggctacaactgggaggacggaatcggaccgaaagagctgcggccgaggagaacggaactggcatggtttgccatcgaggacaaccaggtggggacggatgaattctgcgagtggagccgccgtgcgcatacggatgtgatgatggcggtgaacttaggaacgagaggcgcggatgccgcacgtaatctggtagaatactgtaattttccgggaggcacctactggagcgatctgcgaatcaaaaacggttatcgtgatcctcatggtgtaaaactctggaatctggggaatgaaatggacggcccgtggcagatcggccacaaaacggcagaagagtacggacgcgcggcctgcgagacggccaaggtcatgaaatgggtggacccgtcgatcgaactggtggcctgcggcagctccaattctggtatgaacacgtgctacgaatgggaggctgcggtgctggatcatacctatgactttgtagattacgtttccatgcaccagtactacggaaatgagaagaatgatacgcccagtttcctggccaataccatggatatggaccgttttatcaaccacatcgtctctgtctgcgattacatacaggcgaagaaacgctccaaaaaggttctgaacatctcctttgacgagtggaatgtctggtatcacgcatttgcggacaatgccaaagcggagaaatggaaagaaaaaccggcgtacaatgaggatcagtataacttcgaggatgcccttttggtgggcggcatgatgatcacgctcttaaagcacgccgacagggtaaaggtcgcctgtatggctcagctggtcaatgtcatcgcgccgatcatgacggaaaacggcggcaggatctggaaacagaccatctactacccctaccttcacgcttctctctacggcagaggaacagccttaaatgtgctggtggatgctcctaagtacgactgtaacgagtacactgatgtgccggctctcgagagcatcgcagtggagagcgaggacggagcgtatgtaaccatatttgccatgaaccgcggcgaggaggatctggaagttacctgctgtctgcgggattatccaggatgctgtgtggaagagttcatcaccatggcgggatacgatttaaagcagtataatacggcggaccagccggatcgagtgattccgcagtcctccagtgcctatgagatggagggagactgccttacgattaagttctcagcgtattcctggaatgttgtgagggtgagagtggggagatagatttaataaattgaagcaatatcataatttacaaaggcggcagtaccatattcatataattggttctgccgcctttgtaacttatcctatctattccagatagttctaaacgttcattttgaatttcactgtgagaaaatttctttcataaccaaatgttggaacagacgcgcattttctgattaattgataatgaatggtaaaaaatggatatcccggcaaaacgaaaaaaagcggtcttctgtatggtatagttatgataccggaatacagaaaactgctttttatctttccgcctgaattctgtccatcacacatttatgctctttgtatatctgttgaataatatgaatactgctggataatggtttgctcagatacttatttttgtgataaagcaggagagtctttctggttccctgaaattccatgacaggaaacacatgcagtgattcaaaacattttggctgagtatcgtataagtgttttaaaagcatgggggtactgaaaaatataccgtatccttccacacagagagatacaagagagctggtcagtgatgtttttatgcgcataaacggcggtgtaccattctggacgagttttgacacgatcgcttcgtgcaggcggctggaggcaggatgtaaaaacattggaacatgggaaaaatcggttacagacacaccctccataaaggctgtcttacaggctggatactgctcgctgaaatatttgcgtagcagtccatccgagataatcagatataggtcttccgtttccaaaggaacgatttcacatagatctgaatcaaaatactcatattttgatacgagtgggagtgcaaggtcaatctcattatttttaacggccgcagataaatcaggagatgttttttcaaccagatgtatggtcatgttcggatattcgctggaaaaatgcggagtaaattcgcagacaaatgctgtcgacctgtttggcggcagtccaatagtaatttcgccgacaaattcgtcctgcatggtaataaattggttcagcagctgattttcccggtcgataatatctcgtgctgcctctaaaagcatctgaccggagggagtaagtttcagagagggtttacgttcaaacagttgtaccttataggtactttcgagatgcttgatgtgaagacttacagcctgctgagatgtataaagagcttcagctgcctttgtaaagctcattagttccgtcaccttgataaagcattgaatatcggtcatattcataattaggttctccttgcataaagacaagttttttattgtgactttgacaaaaaaaacaatattttcttttaattttaaacgaattataatggaaatacaataaaaatttttgttgataacaagagaatgagaaggagaagattatgatagtcggttttatcggttttggcgaagcggcatcgtcaatcgcgctgggtctgcgcggagaaggtatcgacagaatagtgtgctatgatgccatgcaggatgatgaacgtatgagtgaaatcatgaaggagagagtagcagcctgtcagggagaaaaagtggagagtgctgcagaggtatgccagaaagcggatgtggtggtttcggcggttccttccaactatgcggtagccgctgctgaagacgcagcggcgggaatcaaagaaggacagctttttctggatgtgtctacagcgacaccaatagaaaagaaaaagatcagtgagatggtaaaggccaggggaggcctgcttattgacggagcgatgatgggggcattgctaaagagtaagcatcaggtgccgatgctgttgagcggcgatggtgcgaaagcctttcgggataaaatggagccataccatatgtgcctggaagtcgtggagggggaggcagggactgcgacgagtattaagttcatacgcagtattacagcaaaaggacttagctgtctgctgattgaatctctgcaggcggcacagcggttcggcgtggagcagacgattgtagactcgtttgtggatacttttggaccagactttattggaattatcaatggatatgtctcgggagcgatcattcatgcggaacggcgtgaacatgaactgaagaatgttgttgatttcttacagagtgagatgctgccgtatacaatggccgaagctactcggacaaagctgcagtggctggccgatcatcatgtgaaggataactttgaatccggtgttgcccgtgattggaaaaaggtattggagggctggaagctgtaacacataccggtaatcgtgttaaaaaggagaagtgagagatttgataaagattaatgttccgtttagagacaaagaatgcaggctcaaagctggtgatctgattgagatgagcggaaaaatatattgcggccgtgatgcggtactcccgtatgtcgtggagctggcaaagaagggggagttatcggagcatggtattgaactggacggggctgtgatttttcatactgcggtaagctgcgccggcatagctccaactactacgagtaagccggaaattgagggatcaatgatacctttatcagaaaaaggagctatgttccatcttggaaaaggcaggctccttcccgagaccattgagggattaaaaaagaatggggcgtattttttgattactccgccggtatcggcattactgacggcttcgatgagtgagtgccgcgcggtactgcatccggaatttgggatggaagcattctatgagattacggtaaaagattttccggcaattgttgcagtggctgacggtgaaagtgttttttcgaattaggggggacatatggtgtttttaaataaagtgacagaagatgtcgctcagacggttgtagatgcaagctctcactggagagacgatcaggttgcctgctggaaacaggcatgtgcagaggaagagattccacacgcaaaatgggcaatggaaaattttataaaaaatgcagctgttgcagataaaaaacattgtgcattgtgcgatgatacagggacgccgcacccgtttctggaaattggagatgaggccgtccttccggctggatttttggcggcaatggaagatgggatcagaaagggattaaatgacctgccggcgcgtccgatgggagtacgcggagacgaattagagcgtatttcacagtgcaaaggcctatatgacgagcctgggatgttaaaacccgctcctacacaaatccgccgtatggcgggaagtaaaattcgtctcactatcctgatgcttggaggaggaccagagatcagaagcagaacacaggctttatttcacatgcattctctggatcatgttgttgaggagatgatagaatgggcggttccacaggtagcagcgcttggctgccagccgtgtacgctgtcatttggccttgggcgtactgcggtggaagcctcttcgctttctcttgaggcaatgaaggatggatgttatgacgtgcagagtgagatggagaaacgtatcacggatgcagtcaatggaaaggggattggaccgatcggcttgggtggtgccagttcggtgcttgctacatttattaaaatcggagatatgcgtgcgagcggtttccgggtggtttcgatgcgcccgaactgctgtatggagattcgtaaagcctcctgtgaatgggagactgtattataacggaaacaaaggagaagagtatgagagaattaattcagggggcatatgatcttcatgtgcatacagccccagatgtactgccaagaagactcgacgatttcgagatggcacagcgggtaatggacagtgggatggctggatttgcaatgaagtctcattacttttgtacgggagaacgcgctgcaatgaccaggaagctttatcctgaatgcgatgcggtggggacaattacactcaatggatcggtagggggaatcaatcctgcagctgtggagatggcagcacgcgctggtacgaagcttgtctggtttccaaccagtgattcagcacatgagcaaaatcttacacttggaggagatcggaatccggataaaaaacttccgtactgggcacaggtggttttgcagatgcgtgaagagggaattgacaatccggttatccgcgtggtcggtgaagacgggaggctgacagaagcaacgcatcaggttctggaggtgattgcaggacatcagatgatcctggcaacgtcgcatctttcacatgaggagacatttgcgcttgtaaaggcggcgaaagaacaccgggtagagcatattattattacacatgtggacttcccaaccacattttatacggtggaagaacaattagaactgctgcgctgcggtgcttatatggaacattgttttgttacatacaattctggaaaagtagactttgaagtagtgttggaacagatacgtgccattggagccagccatattattctctctacggatttaggacagaaaacaggaatatatccggatgaaggtctggaacagtttgtgacaagcctgtatgatcggggtatttcagaaggggatattaagaaaatgacaagtcataatcagcggatactgctgggaaaagcatagctgacatcactcgcaatatttatcacagaaaaaacagggggtttcaaatgaagagaaaaaatacaggtttggcaatgcttttgttggcagctgttttcatgactgcggcatgcagcccgacagatgtaaacagtacaacggggaattccggcagtacggcggccgaaggtgcttcaagcggaggaacacattatgacctgacactgggaaccgcggccagtaccggtacttattatgttgtcggagctgcaattgctaatgaggtcaatacaaagaatccagacttaacggttgtggcacagactacaaatggaggagtggagaatgtaaacctttgtatgtcaggagagatggatcttggcatgacaaatgcagatgctgcctactggtcatcgcatggaggcggcagtggtttttatgaaatctatgcagaaccaggcaatgtaaaaggcgttatgcgtctgtatgagagccagggacatatgattacaacggcaaattcaggtatcgagacgtatgaggatttaaggggcaagacagtttgtcttggaccgccaagcagtacgattcctgctatgtctatagcaattttagaagcttacggtatcaatcctgattcggatatcaaagcggtttactactcaattgacgagggacttgagaaactgactgatggtgtgattgatgctacattttttgtcgcctcggcaccggcatcgggtcttacaagcgcttctgctacctctgatttaaagtttgttgatgcaggagaggagatccttaagcaggtagtagagaagtatccatactataccgctgcggctacaaaagaaggggcatatccaaatatgaattccgtgaatacactgaaaatatatacggaaatcattgcatccggagatgttcctgaagaggcggtctatcaatttgtgaaaggggctttggagggacagcctgattatgtagacgcacatgtggcatgtcaggaaatcaatgcggagacggcagcctctgctgcggccaaactgcatcctggtgcggcgcgttactacagggagttgggattgattgactagagattgaacttgcgaaaggaattgtttatgacagaaaaattaaaatatcagaagatggtagatatgatcgcacttggcatgtctgtaatactttgcctgtttcatatgttttctgcctcttatggaacctggacctcctacgtcctggcggcggtgcactggggttttattgggagttatattgtgcttagaaagcccacaaaacttaagtatatcggaccagtgtacgatgccgttattattatactgacgatctatgcctgttaccatcaggttgccatgcaggagcgtcttgtcacacaggcaggactttataccacagaggatattattgtagcggtgatagctgtactgcttgtgctggaagtcggacggcgggctgtagggaagattcttcccttgatcggagttgcgtttcttctgtactgctattttggaaatatggtaccgggactgatgaagacaaccaggtttacagtgaaccgaattgcgatttttatctatacatccagtgatggaatctttggacagaccctgtacgtgagtgcgaagtatatattcctgttcattttattcgggagcattctggaacttacgggagccggcgcatttttcgtggatctggcatttgcgtttgtggggaaggcgagaggtggtccggcacaggccgcgatttattccagtatgctgatgggaactattaatggttcaggggccgcaaatgtagtaacgacaggtacctttaccatcccgctgatgaagaaaattggtattcggccgagtaccgcgggtgcgatagaggcagttgcatcgtctggcggtcagattatgccgccggttatgggggccgtggcatttctgatggctgagatgacagggatcaactatgctaagattgcattggcggcgttggttccggcaattctttattatatgacattgtcagtgtcagtatatctgattgcccgcaaagataatatagcggccggtaatccggaggatatcaaaaaaccgcgtgaagtattgaaagaaggctggttgtttatggttcctctgctggtactggtggcacttatcatttcaggcatgagtgttcaattatctgcgttttacagtattatcgtaacattaattgttggttttatgaaaaatcgcaggaatatgactgttggaaatatattaagggcctgcgaaaattcggtaaaaagtatcgccccggtagctgctgcatgtatattggcaggtattatcatgggatctatgagtcttaccggttttggacttaagatcagcagtttgatcgaaatgatatccggaggaaatttattgtttgcactattgctttccatggtggccagtcttctgcttggcatgggactcccgacatcagcggcatatatggtattggcggtattggtcgctccggtattactgaaccttggagtgagtaaaatggcggcacatttattcttgctgtatttcggcgcgatttctacaattacacctcctgtcgcactgtcggtatttgctgcctccgggatatcaggtgcgggggtatgggaaactggctgggatgcactgaaacttgctctaaccggatttattattccatttatctttgcctttgataatagtctgcttttgatgggaaccccggtaatgattgtaattgcagtagtaaccgcagtcataggctgcatgattttgtcagtggcggtgtcgggatggctaatacataatttgaatgtaggaacaagactgcttttgctggttgcgggagtgtgtatgattatttcaaatccgttatggattaacctggcaggtttggcgcttgccgttatcgtaatagttacggttttaaaaacaaatcaaaagaatataaaaactgagggggtatattaattatggaaaattattatgaattgccggaattaatttctgaagatcttattgaacgcgcatctaagcttagttctgcaaatatttgcgatggcttaagcaaacttggacttctcgcaggccgctgtatgagcggacagattaaaccggtttcagataagatgagtgttgtgggaaccgcttgtaccgtggaaacaaaagatggtgacaatctgccgttacatgttgcaatttataactgcaggcccggatatgtaattgttgtgagtgggaaggcctttgaagagagagcatatatgggtgatctgatgggcggcgcggcggaggcaatcggtgtgtcgggaattatcgtggacggatatatacgtgacaagacaggtcttgatgaaatcggaatgccgatgttcagcagaggttataagccggcgagtccggcaaaaaagggaccaggaggattgaatattccagtcgaatgtggctctgtcctagtaaatccgggagatttaattgttggagattatgacggagtggtggttgtaccgagagaaaaaataaaagaagtattagaggcagcagaagtaaaagttgcttacgaggaaaaacgggtagctgctatcagtgagtacaggaaatgcaggacagaaggttctgttttgccggatttaacacctgcatgggttaaagaaatgatggagcagaaacaggaggcgtaataatgccgcggattcagattcaaatgcttaaggggcgaacagcagagcaaaaacgacgacttgctaaaggggtaacagaagcagcgtctgaagcgcttggaatatcacaggagcgtatttcactcattatgctggaggtggaggaagaccaactggcacacggtggtctgttatggtgcgacagagaggtgaagcctccgatttaatgacggaaataattttttgccctgataacagaaactggtatgctgttggaaggaggaaataagccggactcatgattgagtaccggtttttccttttttactttctaggaaacttcgcaaatcggccaagatagtgtataatggacttgaaataaaaaatcacataacaaaagagcgaatgtagtgattcgccacgacgttgattatgtagttttttgtttttggtttagactgcgctgtctgacggcaaagaaagaataaggggcatggaactatccataacccattacctttcggaatcgttcaaatagcgcagttttttttgtagtaaacttctaaaaccaacatagaagtgccacacttcggacatttgagtgggtcatatccaaatgtcagaataatcgagttacgccaatccagaagactggaaagatagcgttgtttctgaggggataaacattgccgaagatttttttcctgtttatgatgttttgcataaataccatagtaacgaaccattttgaagtgcttgtcagggatatgaataatcaggcgttttataaagtcaataacggggaggcattctgtaaccgtcttgtgatcctcatgcctggtgtaatgaaacgtcacagagtcaccatcgtaagaatcaattctggaggcagcaataaccggtcgtccgagatatcggctgatatacttaatggtgatatttggagaacagagattgggtttagcacggatataaaaaccattcgggtgatccttgtaaatctggtttttaagtttaaggaaagaagaaccgagtttatgcgcaagtttttctaaaagaaccttacggaaagcgaagcgtaaaaatctgaaatcaaaatgtttgtttggacgccaagaggtaatattaccggcaccgccctcggagatgagcgcatggatatgagggttccatttgaggtctctaccgaaagagtgaaggacacaaataaacccaggagtaaaattttcagttttattaagtttagaaaacatacggaggacgatatctcggacggcatgaaaaagacaattcaaaagagaatgatccttaagaaagaagatgcgaagttcctctggaatcgtaaacacacagtgcctgtggttacaggaaatgagcttgcaggacatacgaaaagcccgtttctgattatacatgttaccacaagaaggacagaaacggcttttgcaggaaaaaggtacagatttaagtttaccacaatggggacagccgtagacagcttgtccataagaaggatcctggcaatgaatcatacgtttgatgttatccataacatttttgccaggacgaagaacataatggatgtactcaaagtggtcactgaaaatagtttgaagaatgttctttttatacataagaatattttacaacaaaaagtgacaaaggaaaaccccaaaacccctcatgagtgaggggtaggggagttgagagtgccgaaggcactttgttctggacagtgcaattaaatttgtctgtttcggctggaataatgactctgtccttgtgtttccacatggaacaggatattattacaatattaagccgctcttatgatgagtactttggtttcaatcaacaagaatctgatcgtatgttgcaagactataatcttgaggcgaaaagtgctgtcacggaatcatgattggggttctaaataatttaagagattatctcgtaaaatcgaaccgggagagtgtaactggccgactggatattttagtatgcagcagcaacgtgtcaaaaacaccagttattatggaacttaaggtattaccaacttataaaaacatggaaagtacctgtgatacggcaatcaggcagattgaagagaaggcgtatgattccagtctgccagaggagggatatacagaagttctcttctatggtatcgctttttacttgacgcaccgtataaaaaaagctatactgacattaacgttaatggaaaggaagagcatcatgaacagaaccgtatttggagtagtagatggagaaaaagaggtcagcctttttacactgaagaacagaaacggcatggaaatcaccgtgtcggatctgggagccgttttgaccagagtgattgtaccggatcaggagggccagccgcgcgacgtggtattgggatatggaagtgccaatgagtaccggaagaatacaagtacctatttcggatcaacgatagggagaaatggtaaccggctggaaggcgccgcggtcaccctggaggggaaagtcttttgcatgacgcctaatgaggggaagaacaatcttcacagcggccctgatggatatcagatccgtttatggaacgtgaaagagccggcagaaggcaggaatgaagttacgtttgttctggaaagcccggacggtgaccagggatttccaggaaatctggaactgtccgttacatacgcgctgacagaggacaatgagatctgcattacctataaaggcgtatcggatgcagagactgtctttaatccgacgaatcacagctattttaatttgaatggccatgacagcggtacgattttgaaccatgtcctgacgctgatggcagatttctatacgccggtcagggattctgcttcgattcctacgggcgagacggcgaatgtgacaggcacacccatggatttccgacagggaaaagcaatcggagccgagattgatgctgattatgaacagcttcagtttaccgggggatatgatcataattttgttatcagccagagtgctggttcaggcagccgcatgggtctgagcaaagctgctgttgtcacgagtccggagagcgggatttccatggaagtagagacggacagacctggtgtccagctgtatgcgggtaatttcctgaacgaggagcccggaaaggacggggtaaaatacggcaaacgatgcggattctgtcttgagacccagtatttccccaatgcagccaatgaaccggcgtttgagtcccccatcataaaagccaatgaaccttgtgtcacgaagacggtataccgctttaagagccgggggttaaaacagggcggagaagacagatgaagaagagaaggccggccgtcacgttaaaggatattgcagcgaagaccggttacagcgttaatacggtttcaagggccttgagggacaaagatgatatcgccgttgaaacgagagagatgatccagaggaccgcgcgggagatggggcatgtgagcaatacgctggcggcctccctgcgcctgggctatacgaacaccatagccgttattttaggagacatttccaaccctcatttttcaatcatgatgaaggaaatcgaaggctatgcgtggaaggccggatatacctccattctgtttaatacaaatgaaaatgaggagctggagctggcggcgattcagtcggctctcaataaaaatgtagatggcattatcatctgcccggctcagaaaacaccggacaatttaatttatttaaaagagtctggagtgccatttgtgctgatcgggcgcagggacgaggcttacagctatgtggtctgcaatgatgagctgggcggcttccaggcgacgaaggaattgctggccgcaggccacagggatattctgctccttcatggagccacttatatatccagtgccagagagcgtctggagggctactgcagagcgtttcgggaggctggcctgcctgtgaacgagcggctgatctgtcaggttccggtggtttccgatggctgcgaggccgtcttaacggcactggagaaggagggacaggagtacactgccatttttgcgttcagtgatatgctggcctgggaggcatggtgctgcctgttaaaacgcgggaaaatggtgccgaaagactgctcgatcatagggttcgaccatattgagtcgcgcttaaagctgccgctcggcctgacttccgtcagttcctacaagggaagaatgtctgtctgtgcggctgagatacttgtagaacagatacggggcaatacagggatcaggcaggtcgtcatcgatacggcgattgcagcgggagagacagtcagaaagccggagagaatatgatatacaaggaacagggaaacagggacgggtgaacgggcagaagtaaagcaggcagaagcaaagagagaagaaataaataagcagaaataaaacgaatataagcagacgaggataaataaatggggattatgcattcggaatacagagacagaatcaatcattggatcaggaccctgaaagaagatttttatactccggtgggcacccttaactgggaagtattcaagaccatggagcagctgagttacgaggaagccggcgcaggaacgtacgagagagtggaaccgggatatacatgggggaagacttacgaatatgcgtggtttcgcaccacactttcactgccggaagaaaccgcgggaaagagagttgtactggacttatgtccgggcggagaatccacggtgtttgtgaatggagccgcgtttggaacataccgggcggactgggtgaagcagccccatcatttcctggtggataatacgctgacccgggaggcgaagccgggagaggtattcgatatctgcatggagacgtacgccggccatttctatgcggaagcccaggacagcggctgtgccaccggtcccgttcttcccggtctttacagggatgaactgaccgaaggggcaagaaggacgctgagggaagggacctatggaatctgggacgaagatgcataccagctttttatggatgtggagacactctccagcctgcttaagatcctggatgaagattccctgcgtgcagccagagtcgccgaagcgctggagcagttcacgctgattgtggactttgagcaggagaaagaggccaggagcagagattaccggaaggcccgcgctgcgctggagcctgtgctttccgcggtgaacggttcaacgaccccggtattttccgcgattggaaacgcccatctggatctggcctggctgtggcctatggcggagacgtaccggaagactgccaggacatttgcggcgcagctgcgtctgatggaggagtatcaagactataaatttatccagagccagccggcctgctatgagatgtgccggaaatactatccggagctgtttgaggaaatcagaaaggcagttaaaaagggccaatggatcgccgaaggcgccatgtgggtggagccggatacaaacatggcgggtggtgaggcgctggtccgccagctgctgtacggcaaggcatattataagaaaatgtttgcggtggacagcaggatgctctggctgccggatacctttggctacaccgcagcgcttcctcagatccttaaaaaatgcggtgtcgattatctggttacccagaagattttctggtcctacaacgagggagaacagttcccctaccattattttacctggagagggatggacggcagtgagatcgatgcgttccttcctaccaattatacgtattatacgtccccggaagagatgaacacagtgtggaaaaatcgtgttcagaagcgcagtctggatacatttctgattccatttgggtatggagacggaggcggaggcccgacgagagatcacattgagtttatagaacgtcagaagaatttagagggcggcgtacgcattgaaatggagaacccggtcgactactttgagcgcatggagagccggggtggtccatccaatacgtatgtgggagaactgtattttacggctcaccgcggcacctatacctcacaggccgcggtcaagaaatggaaccggagggcggaatttgccatgagagatttagaactgtgggcttccgccgccgcatccatgcctgcgggcagcggtatggttcccgatggagagaacgccgcaggcagcggataccggtatcctgcagaggagacggagcgcctgtggaaggaaacgctgctgaaccagttccatgatattcttcccggttccagtatccaccgggtatatgaggaggcagaaagttcccttggccgcgtctgtgaagaggccgggaaattctgcagagacgcagtcacaagcctgatacaagagggcgagggattgactgtattcaactcgctttctttcccgcgcgtctgcctgatcgatgttccggagaattacggaacgggggcaaggactctggacggggagacagttcctgtgtataccgatggtaaaacggttaccgccagaattatggttccgccgctgggagcggttaccgtggttccgtgcggagacggggagactgcgcccgagactgtgaaagagacaggattgactctgcctcctgctgtagttaaatcggaaggagacggtttcgtgatggagaatgacaggctccgggtgacggttgcctccaacgccgagatcacctcctatgtactgaaggagaacggaagagaatttgccgaaacaccgatgaatcatttccgcctgtttaaggatgtgccgagaaagtttgatgcctgggatattgattctaattacagagagcaggagatcgaaggtgccttcgatgtaaaggtggagattatctgcgccgtaggcgccagggcagcgctgagagcgacgggaaagatcggcagttcttccttttgccaggacatcacgctggcagtgggagagagcagagtagaattcaggacagagatcgactggcacgagcttcacagactgttaaaggtcagcttccccaccattttatatggtgagtacgggatcaatgagatgcagttcggatatgtggaacgtcccatgcaccggtccagggcatatgagaaagagcggtttgaggtatgcaaccaccggtacagcgccgtatgtgatggcggcaatggctttgctgtcctgaatgactgcaagtacggaatcagcatggaagacggggcattggagctgacgcttctgcgcgccggcgcctgccccgatatgcaggcggataaccggattcatacctttacgtatggcgcggcggcgtggaacggaagcttccaggagagcgatgtggtgaaacaggggtatgagatcaatgtgccgccccttgtaatcaacggtatcacagataccttttcgctggcagacaccggatccgaccacatagtcattgaggcggtgaagctggccgaagacggaagcggagatctgattttccgcctgtatgagtgtaagaagcggatagattccaccgcggtaaagatcaatctccctgtgaaagcggcatggctgtgcgacatgctggaaaataaggaagaggaagtcagtgtgacggacggggctgtgattctggacttcagggcatttgagatcaaaacagtaaggattgagttaaaataacaggaggtatctcatgaccattcagcagctccagtatgtaatggaaatcagcaggaccggctctgtatcgaaagctgctaaaacgcttttcctttctcagccaaacttaagcaatgccatcaagaacctggaaaatgaactgggaattaccatatttgagcgcacgcccatggggatgcagctgacggccagcggtatgaagctggcgaagaaggccgcctccatcatggcggacattcaggagatcaccagtggaataagtgaggaagaagactgcctgttccggctcgtctatccccgctatgtgcccgcctttgaagcattctgggatttatgtacagagtatcaggagatggcacacctccacttttcctgttacatcggtgacggtgagaagcaggttgaggcactctacagaaatctttgtgacctggtgatttatctggacacaggatcgtccggttttgcaagactctgctctgatcttcacgtaaaatttgtgaaactgaaggatgcctgtttctatgtccagctggctgaagatcatccgctgcttcaaaaaccggaatttaagattgaagaactgaaaaattatccctatgtggcgttttcggatctctatgagagagatgcaaactggatgccctggcaggacattgtcaacccgaaccgtttgatctgcgtccagtccacttcatcacgggtatccctggtctccaattctcaggccttcagtattgtgctccctcattcggaggagtataaccgccttcatcacgtggtcagtattccctttgacagccgtcagctggagctggggtatctctattccaccgaccgcggtctgagtaattttgcaaaagaatatctggaatattttaaagaacggatcagttttttatgataaaagcgctgtgcggagagattccgccagcgttttttctgtaacaggaaactcattgtagaatatcgccatataaattctttatatatctctataagtgaaacatatttcctttatcccccggctatctgatactattatctataataaatgcacagaaggagagggaaagatggaagaaaagcaaataattcatgagattgtgatggaaaaggcagataccatttccgaaattaaccgggctgtatgggattatgcagaatttggttatcaggaaaaacagagcgcggaaaagatgaaagcagttttaagacaggaaggttttgaggtagaggagggactggctggtatttcaactgcttttgtgggccggttcggaacgggaaagcccgtcatcgccattttggcggaatatgacgccctgccggatctgagccagaaggccggctgtgcgaggccgtgtcctattgagggtaaaaaatacggtcacggatgcggacacagcgcattgggagccggtgctgccggggctgcgattgcggtgaaggagtacctgcagagaaccggggtgacgggaaccgtggagttatacggatgtccggcagaggagaccggatttggcaaagcgtttatggtaaaggaacactgttttgatggaatagacgcggcattttgctggcatccaatggacagcaatatgtccatgtcagtcaggacagtggcttattataaggtccgttttgattttaaggggagaacagcccatgccggagcggccccggagctggggcggagcgctctggatgcctgcgagctgatgaatgtgggggtcaactacctgcgcgagcatataatctcagatgcccgtgtccactatgcgtatttagactgcggcggagaggctcccaatatcgtgccggatcacgcctccctgctgtattttatccgggctcccaagcttacccagagtggagagatattagagcggatcaaaaagattgcggaaggcgcggcgctgatgacggagacaagtgtaaccatcaaggttctgggcgggctgagcgatacgattcccaatccgacgctttccagtctcttatccgatgcgtacctggaagccggagcccctgattttggagaagaggaatttgccattgcaagagagtttctgaatgccatgccagagaaacagagggaacgggtggtaaaaaacggagccagacagaatggaatcagcgaggcagaatttgcagaacgtccactgaacaccttcattgtaccttatacgcctgcaatgagaaaccgggtgatgaccggctccagcgacgtgggtgatgtgagctatcaggtgccgactgcccagattacagcggctgtcggaatccctgagaccggtgttcatacatggcagatgacggcgcaggtgggaacttcgatcggtgacaaagccagtcaggcggttgcgcgtgccattgccctggcctgcgcgaaaatctacgggaaaccggagatactcgatactgcaaagaaagagctggaggaggaaaccggaggcgtctatacctctccaataccagagggcatactgccgggagatatttcataaaacagtgaaccgctctatcatacaagaaggagaaaagaatcatgacatttaatgaaataatgaacagtccgcttctctatgcgctagtcggagccggaatcgtatatatcctgatattctgtgtcattaccctgagaaaggcataccgtcacggtctggaaatcggcctgacgaaagacaaattaaagacagccattacctcgtcagccatctattccatcgtcccctccatctccattgttatcggtctgttcagtttagcagcggttctgggggtgccgtggtcatggttccgactgtccgtggtagggtctgtaacgtatgaactgatggcggccgacatggttgccacaggcgcaggctacgaatccatcgccgctttaaatgccgcgggagatgcctccatcgtaggtaccgtgatgtttgttatgagtatctgtattctcggcgggatcgtgggagttctgatcttcggcaaaaaggtgcagaccagcttacaaaaggcgaaaaatactcatggtgcgttgggagccctgctgacaggcgttctgtcactggcgattatcgaagcattcttaccgatccagattatgaaaggaccggtctatctggccgtagtcgttacctcctgtgtgattgtggtaatccatatggcagttataaagaaatttaagatactctggctgcggaactttgttatggcggatacgctgctgttaggtatggcgtcgtcacttttgtgggtcagaatacttggttaatggggaaaaggaaaggaaggtatgattatggataaaaaatacgagacgagcatccaccggaccgggcgcatcggcgtcatcatagcaatagtatttatgctgggaattccaaccattctatcagccgtctatgacgtatggccggagagcatcggacagattttcgccgtgggcggaggcctgcttgcggtctttctgcccacgaatatcgcggaagtattgagctatacccccatcctgggatcctccgcttacttaacctttttaaccggaaacgtcatgaatctgaagataccggtggttatcaatgcgcaggtgctgacagatacctctcaggggacggatgagggggacaccatcgcgaccattggcgtggcggtttcatctattgtgacgacgctgatcattgttctgggagtcgtccttctggtaccgcttcgtccggtactgactagtccggccgttcagactgcaactcagtatctgcttcccgcgctgttcggcggaattcttttgagctttgtcaatgatgactgcggagaatatgaggcaaagggcaaatcactaaccatgattcttccgctgattctggtatttgtaatcaacgcgttctatccgctgaccggaaaagagggctttgtagtgcttctttgtatgggagttacggtaatctgtgccctggtaatgtataaggcggggatcattaaaatgacacgaaagagcaaatgaaaggcccgaaagaaaaattaatggaaatgcagaacatatccctgttactctaatgaaaaaagaggactttccactcaggttcatgggtgaaagtcctctttttgcagtggaatttcatctctcgcagcacacggtgtgcgttggatataagagtcaacagccattgatgaaaaccaaagttttgtatatattgtacaattattgcagcttcttatcgtaaatccttcacatagacatcatatcttatccgtgttatgatggattcaaacaaaaggtaatacctattacctaatactattatgcaggaggattttatatgagttaccagagccatgaatactatttaagacgtgcaatcgagatatcaaaagaggcccgtgctgcgggcaacacccccttcggagcgcttttagtaaataaggacggggacatcgtgatggagcagggaaatatcgagatcacagataaaatctgtaccggtcatgcagaggcaacgctggcagcacgtgcttcccatgaatttacaaaagattatctctgggactgcaccttatatactacggcagagccatgtgccatgtgcgccggcgccatctactgggccaatatcggccgtgtagtttatggcatgacagagcgccgtctgttggagctgactggcagcaatgagcaaaatccgacctttgacctcccctgccgtgaagtattttcccggggacaaaaggcaattgaggtggtgggacctgtcacggaagtggaagtagatgcagccaaagttcatgaaggttattgggactgacaggagggcctgatatggatacgttttctgagaaaataagccctggcaagaacctgctggtaggtttccagcatgtgctggccatgtgccccggaacgatagcggttcctctgatcctgagcggcgccatggggctggacgccaggaccaccgcgtttctggtatctgccaacctttttaccagcggaatcgctattctgatccaggtatttggattgagcaaatacataggttccagatatcctatcattctgggatcctcctttgcgccgttggctcccatgattatgattggaaatacttacggccttcccaccctgtttggagccattatggtatccggtgtactgatcttcattctttccttttttctggataagattctgatgctgtttccgccggtggtcgttgggactttcgttacactgatcggtgtcagtctggcgcctacggctatccaggatctggccggcggtaccggcagcagtacgtatgggtcggtgcagaatcttctgctgggatttggagtcttgatttttatcatcctggtggagaaattcggcaaaggaatctggcgcgccatgtcccttctgctgggaattatcggcggaactctggtcggcgctttcatgggaatggtggatatcacccctattcaggaggcaagtgcattccggctggtgacgcccttttactttggcgctccgcagtttgaagcgggttccatattgatcatgaccattttctgtatcattaatatgattcaatgtattggtgtcttctctgtactggatgagattgccggaacgcatacagacaatgccaccaagattaaaggaatcaaggcgcaggcagtttcgcaggtgataacaggcgcatttaactccgtaccttctaccatgtttaatgaaaatgtcagcctgatcgaccttacaaaaataaaaagccgctctgtcattgcgacggctggggtaatgatgctccttctgggcatatttcccaaggtatccgcggtgataacagtggttccgaaagctgtactgggaggagctaccctggctctgtttggcgtcattacctcgtcaggcatctccatattgtcaaagctgaatttctttgaaaacaataatttcacaattgtgggaaccagtattgccatcggtgtcggtgccacctttgcctccgatatctttgcaggtcttccctccacgctcagcatgatctgcagcaatggactttttatggtaagtgccagcgccattcttctaaatcttcttttaaatggaagcaagggtttgaaacgttgacaaagagcctcctaccaactatgattaaagaaaaaggcaggaggctatcatatggaataccagaagctgaatacactgacgctttccgagcaggcaaagcgtgaaatacataaatacatcaagaacatggatctttcccgtaataataagcttcccagagaagaagtgctggctgagatgatcggtgtcagccgtatcaccatccgacaggcgttaaatgacctggcttcagaaggcattatcttccgccgccagggaaaaggtacctttgtaaacgtagattctctcaatatcaaggtcaaattcaacccctgtatggaatttacccaaatgattgagaacagcggatatacaccttccgtccggctgctgaacattcagaaaattgaccgggatgaagccatctgccagcagctgcagatggagagcagcgaacagctcgtcgtagcagagaagatgtttctggccgatgatctggtatgcgcgttctgccgtgattattttagtttatctctgatcggaggggaggaggcgttttgtgaattcagcaaatacgagaattctatttttcaatacatctacaatctttccggtgagaaaattgaatgggacaaagtggaaatcgataccattctgacgacagagattgaggggctggaccagtatgtagatatcaatcagctgggctgcaaaccttttctgtacttaaaaggaataaattacagctcctctgaccggcctctgattcatgccaacgagtatatcaacacggccattataaagtttaatatgatccggcagaagaacataaggtactgaaagacggcaggtaaatacggataaccgtatgatttcgcagacaggttaacaaaaaagaggacttccagctccgtttcatgagctgaacgtcctcttttacatcctcacttattcagattcccgttccaccttgatttcccagtgaatcaggaatgtcagcgccgcccttaaggcgataatcgcagccaccacggccacttccgacagctgacggaccactacggtacggagaatctcgcttcccagcttaaattccagccccagtgccatcccctgagccagattcagacgaatggagggattcctcttcacgtaatcataaatcccgcgcagtcctgccgcgatgatgaccagaactcccataaattcaaacaggagaatggtgatatcgaccacctgctgtaatagtgtttctaatgcgtttaccacgatgcgtcctcctgactgctgttggtactgtcatgcgtaagcgatgcagccctaattcgatttcacttctttccagtattcattatagatagaatctacatcggttccaaggtactgaaagacttcacagttcttcagagaatccgtgtccgggaatacagccttattgttctgaagatccgcatcgagcaaatcaaaggctcccttgttcggggtggggtatgtgatgtattcaaaattcttcttcgcgatatccgggcggcagaggaaattaatccatttctccgcattctccttgtttggagcgttagccgggattacccaggaatccagccagagattggttccctcctcggggatcacatattccagcgagtaatccagtccgagatcagccacctcctgctgaatgtaaagcatctcaccggaatagatgacgcccatggcggcttcgccgccgatcatcttatcgcggacctgatcgatgacatatgcctggaccagaggtttctgcttgatcagcaaatctctcgcctcggcgatttccgcttcattggtggtgttcatcgagtaacccagagattttaaagccaccatgaatgcgtcgcggacgctgtcctgcatcaggatattgtccttaaatttctcatcccacaaatcggaccacttagtcggcgcatcctccggggctaccatgctggtgttatagaggataccaacggtaccccagcagtacggaacggaatatttattatccggatcaaagcttttggacatatccatatacttgggatcaatctcttttatattaggaatattgtcaaaattgatttcagcaagcatctgattctcgatcatcttctgaatcatataatcggaagggcagaccgcgtcgtatttcacgccacccgcttcgatgaccggatacatctcttcattcgtctcaaacatatcatagatgaccttaattccagtctcttcctcaaactccgctttcacatcctcgtcaatatactcgccccagttgtaaacgtaaacttcgccggcgcttcccgccttatcggcagatttgccgcacccgttcacggtaacggcggataatgcagccacagccataacggccatgatggaacaatacctctttttcataatctgtctccttataaaataatctcagtgtttcttccgcttcggtgcaaagttggtaatcagtaagagaatcagcaccgttaagaagatgatggtggacagcgcatacatggacggcttgatgccgcggcgtacttcactgtatattaacgtggataaggtgttgatgccggcgccgcgggtaaaatgggtgatgatgaaatcatccagcgacatggtaaaggccagcaggaaaccggagagaacacccggaaggatatccggaaatacgaccttgaagaaggcatagaccggagttgcccctaaatccatggcggcctcgtaagtactcttatccgtttgttttaacttcggcatgacacttaagatgacatatggaatgttaaaggtaatatgtgcaatcagaatcgttttaaacccgagggagattccaaaggcgataaatgccagcatcagggagatgccggtcacaatatccgcgttcagcatggggatattggtgattcccatcacaattgtacggggaacccgtttcatgttattgatagcgatcgccgctgccgtgccgatgatgactgcgatgatggaagataaaaatgcaatcagcagcgtattatagagcgccgtcatgatggtactgctggaaaacagttccgtgtaccaccgcgtggtaaacccgccccactgagtcctggacttggagctgttaaaagacagcaccgccatggtagcgatgggagcgtataaaaataccaggatcaggaccagataaaagtcctgaacaaaacgtttgagtaaacctgtttttttgcccgtcaaaatgcagtcccctccccgtttttatcgtatttggcgatcagcgccatactgattaagataaagatcatcatgacaagggagaggccggatcccagattccagttgctgcccttggtaaactcctgctcgatgacgttgccgattaagagaatcttgcttccgcccagtaagttggagataacgaaggtggtgagagccggtacgaacaccatcgtgattccgctgacgattcccgggatgcttaagggaagcaggatacggaacaggatctgaaaaaagttggcccccagatcctgggcggcattgatcacattgtcgtcgatcttggacagtacattataaataggcagaaccataaacggcaggaagttgtacaccatgccgaggataatggcgcccggtgtgttgattaagccctggggcggcagatggagcgccgataaaactccgttgatgacgccgttcttctccagaagcgtctgccatgccagcgtgcgcagcaggaaattcatccacatcggaaggatgaagatgaagacgataaagctgccctggccgatgccgcgcgcccgtaaaattaaggccagcggataggcgagaataaaacagatgaccgtgctgattaaggaaaggccaagggacagccacagtgccttggagtgttccgccgtggcgatggacaggacgtttgccatggtgaaggccccgcttctgtctgtcagaccgtaaaatacgatcagagccagcggaatgatggtaaagccgatcatccacatgagatacggaccggataataattttttactcattgactcccacggcctcctcatcctctgaagccggcttgttcatgatctgaatgtcaaatggatccacatggatatccacttcctgtccgaccgggaacatgtccgtgctgtgtacaagccattcaaagccatccggcgtggtaacttccatctcgtagtgaacgcctttaaagattaaatgagtgactacgcctgaaatagagccgtttcccggaggcaccagatcgatatcctccggccggatcaccacgtccaccggcttgttgtttccaaaccccttatcgacgcagacgaacctggcgccaaagatttctaccagctcgtcccggatcataatacccggtacgatgttgctttccccgataaaatcggctacaaaagcattttcaggttcattataaatgctctcaggagatcccatctgctggatatatccctggttcatgacgacgatggtgtcagacatggtaagggcctcctcctggtcatgggttacgtagataaacgtgatgcccagctcattttttaaccggatcagctcatactgcatatcctggcgaagctttaaatccagcgcgcccagcggttcgtcgaggagcagaacacggggttcattgacaatggcccgtgcaatggcgatacgctgctgctggccgccgctcaaagaatccacggtacggttttcgaagccgtctaaattaaccagctttaaggcatacttaatcttatcctggatatatgtttttggtttatttttaatcttaagtccaaatgcgatgttttccgcaatcgacatgtgggtaaacagcgcgtatttctgaaatactgtgttcagctggcgtttgtttggcggaaggctggtgatatcctgtccgtcaaagatgaccgtgccctgatcaggccgttcaaatccgccgattatccggagcgttgtggtttttccgcagccgctgggtccaagcagtgtaacaaaagtattttcctttacggaaagatttaaatcatccagcacgaccgtgccgtcaaatgtcttcgtaatgttctttaaatcaattaatggctgacccatgaccctttatcctccttgaaattaaaagctcggcggagagctcacccagattaagacggcgcctgccttgctgctcaaatagtgttttttatcagaaacaaagtaaaaggattcccctttttttgctttatatgtcttgcttcctatatgaatggaaatgttgccctgcaggacgtagccgaactcttctccctcatggggattgtcggggtaggtttccccgcccggctccagtgtcaggagaataggctccatcatatttttctgcgcgttgggaatgatccatttgatctcatttttcagttcctgatcgtgcttttcaaagtaatccgttttcccgaagacgatctgttcctccggagtctcgttaaagaactctccgatggaggtcccaagacactgcaggatgtccatgagagtcgcgatggagggggaagttaagtccctttccagctgggaaatgaatccctttgacagctccgcacggtctgccagctcttcctgggttaggccttttaagatccgcagttcttttaatttcgcaccgatatccatacgctcctccttttaataaatataagcctggagtttagttatactaactgacgataataataattaaaaagtttagtaataataaacacacggcaaaatacattatacccgattttatccgtatgtcaatagtttctccttaacaaatatacttttttatgatatgatatttttagtttatacaaggaacaatccaggaggacgcgaatatgaaaggaaagtatatggcatacgtaggttcctactcctacaacggccaggcaaaagggattacggtgtacgatgtggacgtggccaaaggccgttttataccgagatgcgaggtggaagtggacaattcttcctatttaatagcatcgaatgacggaaagaccctgtactctatcgcggacgaaggcgtcgtatcattcaggattcatgagaacggggcgattacaagactcaattccgccaacatcaaggggatgaggggctgccatctgtctacggacgcagaggacaagtatatatttgtatccggatatcacgacgggaagtccaccgtactgcggctgaacccggatggaacggtgggagatatcgtagacggagtgttccacaagggactgggcagcgtggcggagagaaacttccgtccgcatgtaagctgtacgaggaggacgccggatggcagatttgtcatggtggcggatctggggatcgatcaggtaaagatttaccggttcgatgaaaaagaggagaagctgatactggtggatgcgcttcgctgcgagcgggaatctgctccgagatgcttccgtttcagctcggatggaagatttttctaccttttatatgagctaaaaaatgtgatcgacgtttacacctatgagacaggcgaacgccagccgaagattgagaagatacagaccatctccacgaccgggccgaaggcgttgtcccagctgactgccgccagctccatgcgtttttctaccgatgagaagcacatgttctgtggtaatgccggcgataacacgataaccgtctacgaccgcgatccgaagaccggcctgctggattatatctgctgtctgcccatcagcggcagttatccgaaagacatctgcgtattcccggatgacaggcacatcgcatcgattaaccatgagaacggcagcatcacattcttctccgtagactacaagaagggtctgctgatcatgaacggcaaggaaatcagagtcaatgaacccaacagctgcgtgatcgtaaaggtcagcgactaattgcagaaaatggtatttaaaagccggggacccgttcgtctgcatgatggacgagggccccggttttgagaactgagataaggagaaatcatacatggcaggatcaacactggggaccatatttaagataacaacctggggagagtcgcatggaaaggggatcggtgtcgtggtggacggctgccctgcgggacttcctctttcggaggaagacattcaggcgtacttagaccgcagaaaaccggggcagagccgctttacgaccaaacgccaggaggcggaccgggtggaaattctttccggtgtctttgagggaaggacaacggggaccccgatttccatggcggtgatgaacacggaccagagatcgagggattacggaaacatcatggaggtctaccgtcccggccatgcggattacacctttgatgaaaagtatggattccgggattaccggggcggcggccgttcctccggccgtgagaccatcggccgtgtggctgcgggagccattgcggcaaagctgcttgcgagtctgggcatcacggtatgcgcctacacgaaggcggtagggccgtacgaggcggatcccggccagtttaatatggaagagatgcacagaaaccgtctctatatgccggatgcaggcaccgccgctttggcggaagcgtatttagaccgtatgatggcggaatgcaattcggtcggcggcgtggtggaatgtgtgatcgacggactcccggccggaatcggagatccggttttcgaaaagtacgacgcgtcgctggcaaaggccatcctgtcgatcggagccgtaaagggctttgagatcggagacggattccgggcggcaaagtcggtgggatcggaaaacaacgacgctttccggatcgatgaatccggaaaggtacagaaggagacgaatcacgcggggggaattctgggaggcatcagtgacggaagccgggttgtgctgcgggcggccttcaagcccacgccctccattgcacagccgcaaagaagcgtgacacgcggactggaggagacggaacttgtgattaaaggccgtcacgaccctatcatcgtgccgcgcgcggtggtcgtggtggaagctatggcagcgctgacgacagcggatctgctgctctgctccatgacctccagactggaccggatccaggcgttttttggcagacaggaagctaaatcataaatcagacaatcgacagaaacaggagtgaatacaatgaaaatcgcaataggaaatgatcatacagcactggaaatgaagaatgagatgaagaaatttctggaggaaaagggatacgaagtaatcgattacggcacaaattccacggagagctgcgactacccggtttacggtgaaaaagtggggaacgcggtggccggcggagaggcggacttagggctcgccatctgcggaaccggcgtaggcatctctctggcctgcaacaaggtaaagggaatccgctgctgcgtctgcagtgagccgtatacggcaaagctttccagaatgcacaatgactccaacgtcctcgcctttggtgccagagtcatcggcgtggagatggcaaaaatgattacggaagaatggctgaatgccaaatacgaaggcggaaggcaccagagacgcgtggatcaggtgatggatatcgagagacgtaaccagaacgcgcggtagtcaggcgcatgggatgaacggatgaaaaaaggaaagattaccaagagtctctacctgtgggtgcggtcctttatcatcgtatccgtcgtaatgatcggcatgctggtggcgctcactacctggatggtaaaagagttctccggagagatcgaggagctgaaccacggtctgacttaagacaggaaaaccgggtgtctcaaatttatgaggcacccggttttcctgtcttttattccatatatccgcccttcatcggcgatacggcatgttcagagaagatcttcagcacgccggaggtatactttgcaggcttcggcatccagttcttccggcgcccgtccagtatggcgtcgatttcgtccgctgtttttttctctccccggactccgacaatccgcagaatcctcgcgggaatatcgatttctattaagtcatcctcttcaatcagggcgatcggtccgccgtctgcggcttcgggcgatacatggccgatggcaggccctttggaagcaccggaaaaacgtccgtcagtgatgagggcaatgctcttcgacagctcctcatcggaggagatggcctccgtggtgtagaacatctccggcataccgcttccctttggcccttcatagcggatgataacggcgtcgccgggccggatggttttgtttaatacggctgcgatggcttcttcctcacagtcgaagggcttcgcctttaacacggcctggaacatttcctttggaacggcggaatgcttcacctctgcgccctcgggagccagattgccgcgaagaactgcgatggtgccgttgtctccgatgggagtctggaagcttcgaataatgtcggtgcgtttccggccggcctttgccagatattcatcacatttctcatagtaaccgctgctctttaagtcttccagattctctcccagcgtcttgccggtgacggttaagacgtcgagatgaagcatgctcttaatctcttccataattctgggaaccccgccggcgtagtagaaatactgggccggccatttgcctgcgggccggatgtccagcagatagtgggcattccggtgcatacggtcgaaatagtccgcatcgagttcataaccgaactcatgggctgcggccggaatgtgaagcagggaattgctggatccggatatggcagcgtgcaccatgatggcattttcaaaggacttcatcgttacaatatcggtggatttcagccccgtctgcgccagctttaccgactgtacgccggcgtcataggccgccttcttcaaatcttcgcaggtggccggcatcagggcggtgcccggaagcatcagtcccagcgcctccgccataatctgcatggtggaagccgttcccataaaagagcaggcgccgcaggaaggacaggcgtgctgtttgtaccaggtcagctgttcctctgtgatttcgcctctctggcatttggcgctgtacattccgatctgttccagggtgaggagatcggggccggcatccatgacgcctccggtcacgacgattgacggaatcttcagtctgccgattgccattaaatgagccggaactgctttgtcgcagctggcaataaaaacaccggcgtcgaaggtggtggcgtttgcgtgaatttcaatcatgctgcatatggtgtcgcgggaggcgagagagtagttgattccgtcgtggccctgagccatgccgtcgcagatgtccgtggcaaaataccgcgctcccttgcctccgctgtgattgattcctttcacagattcttctacgagccctaataaatgagcgctgcccggatggctgtctccaaatgtgctttctactataatctgaggctttgacagatcctctgctttccagcccattcccatgcgcagcggatccatctccggcgccagcgcacggacttcctgacttttcagtttcattgcggttcctcctgattttatatttttcgaacaaaggcataatacgtatgatgtattttataagtacaaaataccatactcacagcgcaaagtcaacaagcctttggaaaaatatatcaggtgcccctgcccggagctgcggttcgccgcacattgcagctctaacggagcgtcttctcctctttttcaagctgccggaagactctccggttatagattaaatgcatgtacatcgcgcattttgcgccttccgcgtcgcgctctgcgatgcagtttacgatctcgcggtgggtctcgatggtttcctgacccagcgcccggttggtgacatcgacaaatacggcgatggaagagttgatgaccggaaccagcttttccaccacgctgttgccgctgcaggaggcaatcagtgtatgaaggcggatgtctgcttccatatgatcccggccggattggatcagttcttcgatctggctgcactggagcctcatctcctcgatctgttccggcgtcgcgtggtctgccgccatcatggcgatctccggttctaacatcagacgtacgctgactaaatccagtgccagcttggtcttgtcttttacaaaggtaaggccaagcggatcgtcggtgatcccctgcctctcggagacaaaggtgccggctccgcgccggatctccagaatctgccgggataccaggattttgatggcctcgcgaatggtcgtacgactgacgtttatcatcttgccgagctcaaattcattgggaatcttggctcctacttccagactgttatcgataatatagtttaaaatgtaatcggcgacctgctccgccagcggtttcccgttataaaactctaaactgttcaacctttctacctccctgctgaattgagtttattttaacacattgccggtcgtttgtcaccagatggacacggaaaatgaagcgaaaggcagctgggggcgtacagatgtcataaaaaacacaagattgaaatagatcatacgtatattgggcaaaattgcacaaaacggtattgctgtatttgtgcaaaagatgaaaatataggaataatacttgacatatatcggcagtaatgataatttataggagaaaagacatcatacgtattatgaagagatgaaaaaatgaaacagggaggtatttttattatggattatgtagctaatccggcgcagttgataactgccacactggtagggtttgtggtgctcttgttcctgattattaagctgaggcttcatgcgcttctttcggttcttatcgcgggagtcatcatcggagtcggaagcggaatgccgttttcgcttgtcactcaggcggttacagacggcatgggcaacacgttaaaggggatcgcgctgatcgtcggactcggttccatgtttggaggaatcctggaggtaagcggtgcggcgcaggcgattgctgacaagctggtcaaggtattcggcgaaaagaattctgcgtttgccctggggcttgcaggcgttatcatcggtattccggtgttcttcgatccggctttcatcattcttatgccgattgtttactccatagccaaaaagacaaataaatctttactgtattatgtgcttccgatgactgcaggtctcggcatcggatccgccattcctccgacaccggctcccatgctgatcacgggaagtctccctgtagacctgggaacggtcactatcctggctctcgtgcttgttatcccgaaatatctgatcagttatgcggtagcggtaccatttgcaaagaggctttatgttccggttcccgaaaatgcagtgttggctcctgagaagaaagaaggcgctgcgggcgggccatcctttggtctggttatctccattgtgcttctgccgattcttttgattctggtcagtgcgtcggcaggtatgatgacagcggacagcgccggcatgcagaattttctggatttctgtgtgtttatcggtcagccttatcttgcgctgatcattgctaatgtggcaggaatcatattcttatgtgtgcgcaagggaattaccatggagacggtggaatccgttcttgcgaaatcccttcagcctgtagccatgattgtcctggttacctcggccggcggagtgctgcgctacgttctggactattccggaatggggacgttaatcggcaatgccctgcagaatgccaatctctccatcattcttgtggcttatattatttccacactgatgagaattggcgtgggctccaccacggtagcgctgacgatgactttgggaattgttgcttcatttcctcagatatccacctactctccgatgtatctggcctgtatcggtatgtctgccatgttcggagcgaccagcttctcccatgtcaacgattccggtttctggctgacaaaagagtatatgggaattgatttaaagacggcgtttaaatcctggaccctgtatggaggcttctgctccatcctgtcatttattgtcttatatgccatcagctttatctgggcataagatttagaaaggagtatacatatggcacttttaaatgtagatttttactcatattatctcggtatggattcccctctgaccgttcttcttccggaaaaaagagggagaaagccggaggcgtctcctgacaaaaagtatcccgtgctctacctgctgcacggtcatgcggacgacaatactgcatggatcagaaagagtgatttagagctgctggtcagggatcatgatctcatcgttgtcatgccgtcggcacacagaagcttttacacaaacggcaggtacggccatctgtattttgattacattacaaaggagcttcctgtcattgtgggcaatttcttcccggcatctgccaggagggaggacacctacatcggaggcttgtccatgggcggctatggcgcgctgaaggcggcgctgtcctgcccggaacagtatgccggagtggctgcaatgtcggcggccaacagcccgtttggagccatgaaggcggcgggaccgatgttctctgttccggactttatggacaatgtgtaccggattttcggtgacgaggcggagtataaggggtccaaggaggatctggagtatctggcaaagcaggcggcatcgtccgcgggaagcgggctgaagatctatcacagctgtggaaaacaggatccgctatacggcctgaatgtggaatttaagcagtttatggaaacggagtgcccggagctggattaccattactgtgaatgcgacggcagtcacaattggggcttctggaatccccagctgaaatgtatactggaatatttcgggctgattccggccagccaggacaagtctggcacctgaacgtcaaattgaaatgagagtatccaagcgcgatagcccaatttagcggcagccggcgcttggatactctcattttgcgttcatggccagccgccatccgaagacgcggacctgtccgtttgattacgcataatcggagcctgtcacggattgtgaaaaaattattaatttttaataatagttattgttattagtttaacagtgtgatataatgagaccatcttggaaatactctagttatctgcagcatattttaagaactgggatttactcagccaaatcatgataggaggatattcacatgaaagaaactattgtagtaatcggggcaaatcatgctggaacggcggcgcttaacaccatcctggataattataaggataaagaggtaatcgcctttgattccaacagcaacatcagtttcctgggctgcggtatggcgctctggatcggcagacagatatcgggaccggagggactgttttactccgacaaggcggcttttgaggcaaagggcgccaaaatatacatggagacaccggtgacttctgtcgattacgacaaaaagatcgtctatgcatccgaccgcgaggggaatacgtatgagcagcacttcgacaaactgattctggcaaccggttcgcttccgattcgtccggccatcgaggggatggatctggaaaatgtgcagtttgtaaagctgttccagaatgctcaggatgtgatcgaacgcctgaaggatgaaagtgtaaagcgggtcgcagtggtcggcgccggttatatcggtgtggagctggcagaggcatttaagagaaacggcagagaagtggtgctgatcgactgtgcggatacctgccttgcaggctattatgacagagaattctccgatcagatggcggatcatttaaaagagcacggagttaccctggcttttggagagaccgtgaaaaagctggagggttccgttcgcgtacagaaggtgattacggataagggaagctatgatgccgacatggtagtgtttggaatcggctttaaacccaataccgcactgggcggagaccggattaagctgttccggaatggggcattcctaacagatctgtgtcaggagacaagcgttccgggagtctatgcggttggtgactgtgcaacggtttacaataatgccattcaggctacggactatattgcgctggctacaaacgcggtccggtccgggattatcgcggctcacaatgcctgtggtacgaagctggaatccgtgggtgtccagggctccaacggcatcagcatctgggggcttaacatggtgagcacgggaatcagcctggccaaagccgaaaagctgggaattgatgcgcttgtgacagattttgaggactggcagaaggcagagttcatggaaaatggaaattataaggtgaagctgcgcatcgtttatgataagaacacgagggtgatcctgggcgcacagctcagttccgactacgatatttccatggttatccacttattctcgatggcgattgaagagcaggtgaccatcgataagctgaagctgtttgatgcatttttccttccccactttaataaaccttacaactatattaccatggcggcgctgggcgcgaagtaagagaactgaaaatccggaatttacaacagacatggctcgtgttaaaatcggaatagaagatggacaacacgagaaggaggatatggacacatgaaaaaggtgggatttatcggaattggaatcatgggaaaatccatggtgcgtaatctgatgaaggctggttttgaggtggcggtttacacgaggaccagggaaaaagctgaggaggtgatcgcggagggagccgtctggtgcaaagatgtaaagacctgtgccgccggacgtgacgctgtgattaccatcgtgggatatccgaaggatgtggaagaggtttatttcggggaaaacggaatcatcgccagtgcggatccggataccgttctgatcgatatgacaaccacgagtccgaagctggcggtcaggatatacgaggatgccaaaaaggcgggattaaaggctctcgacgcaccggtaaccggcggagatacgggggccagagagggaacgctgacgattctggccggtggagatgaagcggactttaccgcctgtatgccgctctttgaggccatgggaaagaatatcaagtacgaaggaaaagccggaaacggccagcataccaagatgtgcaatcagattgccatagctggtgcaatctccggcgtatgtgaggccatggtctatgcgaaggcggtgggccttgatgtggcgcagatggtggattcgattggcaccggagcggcaggcagcgcacagcttaaaacggtggccccgcgtattctggcaggagactttgatccgggcttttttatccggcatttcattaaggatatgaagcttgcatctgaggaagcggaggacgcaggcgtccatctgggcgtgctggaatacgtgctttccatgtatgaggatatggaggcacaggggaaaggaagtctgggaacccaggctctggttcagtattatcagtggtaaacccggtaccgggaatcaaaaatgcggatatctgccgtgaatagacggcggatttccgcatttttgatatcatagagaagtgctccctcgatatcggaagttctccgggcaggaccgtttcctgtttattcgatctttccgattccgggataataccggaacagcaccttcgcaatgattttatcgcgttttacgtatttgttctcccatcgtctggcgtcggcggagaaatttcggttatcgcccatcataaagtaggaatcttccggcacctcgaagcaggcgggaagttccgggtccataggctcccgaatgtaaggttcgtcgagaggtgtacgggatccgtttaaatagacctttccatcgatgatatcaacagtgtctccgggcagaccgatgatccgctttacatagtaaatggtaccggtggggtcatccggaaaatgaaagataacgatgtcgccgcgttttggatcgccgaatttgtacgacagcctggaaccgatgacgcggtctccggtcatgatcgtattttccatggaaccacttggaaccttgctgtttgcgatgatgaagttgtttaaaacaaaggcaatgacggctgcagccgcaatgattttaatccagcttatgatttcggctttccagtcaaatgcctcatttttctccagtctgttatcttccctgttcataaagaccttcttttctatccattattttgtccataagagagtttaaatgagttttccggattccgcaaggggttttcctaaatggtaagaaaatattcacaaacattccacggaatgtccataaaaatatggtaccgttattttaaatcatttgctgtgcggggcatggcgaaatacttcggggggaaggcgtatgggagagaaaatatggaaaaacgctcataagaataaggagggggcttcggcggaattcggaagtgaagaacaggggaagaacctccggggcaggaggaaggggacggaatgccggcttcttctggcttccggcattctgtttgtcgtgtcgctgcttcttcagctcctggcccgtctcgtgccgggatttggagaatggtatgcggtaaccgtttacccggttattgtgggaacgctgggaagagtatccgggagtgttcccttttccgtagtggaggcggccgcgtatctgttgactgcagccgcagtctggtacacggccgttcatttgaaaaggattcggatggtgcttgtgcgggcgctgctttttttgacgggtatctttttcctgtttacctgtaattgtggtgtcaattattatagaaaaccgttttccagttattccaatctggaagtgaggaattcttcgaaggaagaactgatcgatctctgtaccacgctgactgagacggtcaatcaatactgtgaagacggtgtgggggcagccatggaattgaaagacgcgaaccgggaaggtgtggcggccatgagacggctgggagaacagtatccacagctcgccggctactatccgggaccgaagccgcttgcatggtcgtatttcttttccgttcagcagctctgcggccagtattcgccgtttactgtagaggcaaattataaccgggagatgccggattataatattccgcacacaatctgccatgagctgtcccatctgcggggatttatgagggaggatgaagcaaattttatcggctatctggcctgtatcggttctgattccccatcctaccgctacagcggatacctgaccggctgggtgtatgccaccaatgcactggcaaagacggatatggaggcgtatctggagctgtgcggcgttctggatgaacgggcctgggcggatttgagagaaaataatgaattctgggcaagatatgacgggaaggcggcagaggtctccaatcagctgaatgatacgtatttaaaaataaacagccagacagacggagtaaagagttacggccgcgtcgtcgacctgatgctggcttatgccagaaaacaggcagattgacagacgggaaaacggcagaaaatgatggaggagtcaggctttttgtcggaaaaatacggaaagtgctgtgggattctattgtaaaatacgcatatgaatgctaaaatagactcagttacagaccccgccgcagtcaacggggctttcaaactgcagcgccgtgagtggcggttttccggccctcgcggcagtcaccggaggagcggcattcgcgtccgtccggtacgttgctcgcgggaataaacagggaccaggaggatattgtatggacaaaaagttgtatgatttgatggattgggccgggattgaggagatcgtatattcagaagcggcggacccccacaagctgctgggaccgcatgttacagacgacgggctgttgatttccgcattcataccgacggcggtcatggtgacggtcagactggcctcctcggggaaggaattcccgatggaactggcagatgaggcgggctttttctccgcactgattccgagaaaaaatattccggagtacaccctgcttgtggtttacgataacggcacgacagaagaacttcacgatccgtatgcattttcaccgttatatacggagtcggatttgaaaaagttcgaagcgggcgtacattatacgatctatgagaagatgggcgcgcatccggccaatatcaacggtgtggccggtgtgtatttctctgtgtgggcgccctgtgccatgcgcgtcagcgtggttggagattttaatttatgggacggaagacgccaccagatgagacgtctgggcgactccggaatttttgaactgtttattccgggactggcttccggactgatctataagtatgagattaagaacagtcacggagatccccagctaaaagcggatccgtacggtaatttctgtgagctgcgtcctaacacggcttctgtcgtatgggatacggaccgttacgagtggcaggatggcgcgtggatggaacagcgtgcgaagacggattctaaaaatcaggccatgtctatctatgagattcatctcggatcgtggatcaggaaagagacagagcgggatgagaacgggaatgatatcgttggttccgagttttataactaccgtgagattgcagtaaggctggcagagtatgtaaagatgatgggatatacccatgtggagctgcttccggtaatggagcatccgctggacgcttcctggggctatcaggtgaccgggtattacgcacccaccagccggtacggtacgccggatgattttatgtatttcatggattatatgcacggacagggaatcggcgtgattctcgactgggttccggcccacttcccgagagacagctttggtctggctaattttgacgggacatgcgtatatgagcataaagatccaagacagggcgcccatccccattgggggactctgatctataattacggccgtccgggagtttccaatttcctgattgccaacgccctgttctgggcggataagtaccacgcggatggaatccgcatggatgccgtggcttccatgctgtatctggactatggaaagaatccgggcgagtggattcctaatatctacggcggccatgagaatctggaggccgtggaattcttaaaacacttaaattccgtgtttaaggcgagaacgaacggagccgtcctgattgccgaggaatcgaccgcatggcctgagattacaggcgatatcaaggaaggcgcccttggcttcgattataaatggaatatgggctggatgaatgattttacgggatatatgcagtgtgatccttatttcagaaagcaccattacggtgaactgaccttcagcatgctttatgcatacagcgaagatttcattctggtattctcgcacgatgaagtggtccatggaaaaggctccatgatcggcaagatgccgggagaggagctggagataaaggcggcgaacctgcgcgccgcatacggttttatgatggggcatccgggcaagaaactgctgtttatggggcaggaatttgcacagatccatgagtggaatgagaatgcagagctggattggggaattgtggaacaacccctccataagcagatgcaggagtatgtgaagtccttgaatgaactttatgtaaactatcctgcgcttcaccagatggactacgaaccagagggatttgagtgggtaaactgtacggattcggaggaaagcatcgttgtattcctgagaaagacgaaaaagaaggaagaaacccttctgattgtctgcaatttcgatacggtcctgcacgagaaattccgggtgggcgtgccgtttgcgggaaaatataaagagatatccaacagtgatgcggagctatacggcggcaaaggccgtatcaatccgcgcgtgaagagctcgaaaaaggcggagaaggatgcgagaccggattctattgagatcacggtggcgccgctctctgtgatgatcttcacctgcacaccggcagaagataaaaaagctgcaaagccagcggcagcaaaaacagccggaaagacgaaggctttgaaggctgcggagaaaaaaacagaggtcaaaaaggccgggcttcagagaacagccggcaaaaaaaatgagacagagaagagtgcggacaagaaacaggagcctcagaaaatagctgataagaaaccggagacggggaagataacggacaagaaaccggaggcaaagaagatcgaggacaagaaaaccgagcctcagaaaatagccgacaagagaccggaagcgaaaaagatcgaagacaagaaaccggaaactcagaaaatagccgacaaaaaaccggaagcgaaaaagatcgaagacaagaaaccggaaactcggaaaatagctgacaagaaaccggaagcgaaaaagatcgaggacaagaagcccgaaactcagaaaatagccgacaagaaaccggaagcgaaaaagatcgaggacaagaagcccgaaactcagaaaatagccgacaagaaaccagaggcaaaaaagatcgaggacaagaagcccgaaactcagaaaatagctgacaagaaaccggaagcaaaaaagatcgaggacaagaagcccgaaactcagaaaatagctgacaagaaaccggaggcaaaaaagatcgaggacaagaaaacggagcctcagaaaaaagctgacaggggaccaaaggatgagagatcttagatgcgggaactgagctgaccggataatttttgaatgaactgatttgattggagagatataaaaatatgatcacaggcgattccaccgcgggcctgccggatgaaactctggcggccctgcagcaggaagttcagcagaacttagaacaactgaagcccaatgtaatgctggagactatgaagggctgggtcccgggactgattgcatttggcatcaaactgctgatcgcaattgcaatatttgctgttggttccagaattattaagatgatttatcgtatgctgaaccgttcttttacaaggatggacatggagatcagtttaagaaagtttctgctttctgtactgaatgccaccatgtactgccttctgggctttatcattgccgggcagatcggtgtcaattcagcctccattgtagcacttctgggatcggccagtattgccgtgggtcttgctgttcagggcagcctggcgaattttgccggcggagtactgattcttatgatgaaaccgtttcgggtgggagactatattgtctccaaagacggagaggggacggtgtacaccatcggtcttgtctatacggtcctgaataccgtggacaacaaacaggttgtaatccctaacgggacactgtccaattctcctctgactaatgtgacggccatggataagcggcgtatcgatattaaaatcggcattggatacggctcggatttaaaacgggcaaaacagattatggaagagatatatgtcacccatcccgctgtcctgaaagaggaatccatcgatgtatttgtcgatgaattaggggcaagctccgttacgattggcggtcgtggctgggtcgccacggaggactactggtctacaaggtggaatatgatggaacagattaagcttgcatttgatgaagcgggaatcgagattccgtacaatcagcttgacgtgcatatcagagacgggaatacggagaaacaggacgtttaaagcagtccggccgctgccggatcaagctgcagaggggcgctgttcagacggtaaaggaccggcggacggtgcccctttttgcagctgctccgaaatggttttgcagcagcaggaagaaacacggactcggtccggataaaaatgcaggcaaaggagtacggaagatgaagcgaacacggtttatgaataggttcgggatatgggctgttttcagcctgataatcattatgatatcagccatatctgtcacacctgtggctgcggaaagccagccgcgtgtgcttcgtgtagctttttgcgaaattgaagggattacagaaaaggacccggatggaacacgccatgggcttgtggtggattacctgaatgagatagcgaaatacaccggctgggagtatgaatacattgatactacagcggaaaccatgctcgaggagtttgcggatggagagtatgagctgatgggcggcaactattatatgcctggcctggaagcgtattatggttatccggactacagcatcggaaacagtaaggcggttattttagcgcgtgaagacgacgactccatacagagctacaatctgaagtccttaaatggtaagaccataggggtttatgaacgggcaacggagaacatccgccggttaaaagaatttttgtccatgaatgctctggactgtacactgaaatattatgcatatgaggatctgacgaatgggaatctctatccctgcctggaacggggggaggtcgatcttctgctgggaaacagcagtgaacagagtccgggaatccgggtggtggtttcttatgactcacagccgtattacattgttaccaatgtgggaaatcaggaggttttggatggcctgaatatggcgatggccagaatcgcagattctaatcccaattttgcggcagagcggtataatgctaattttttaaacgcctccaatgtacgtatccggctgaatgaggaggagcaggagtatatccggcagaagggcagtgtgactgtggcgatgccgtgtaattttcatcctctggcctgtgaaaaccccaacgatatacatgatgggctggtgcacgatattttaaaggagatggccgaatttaccggactggagtttcggtttatttctgcggattcctatatgaatgccatggagctggtacggcagggcgcggcggatcttctgggcttttatctgggagatgtgtctgattccatgcagaagggaatggtgcttacggcgccatatgccagtatgaacagtattgtcgtgcgcagcaaggcgtccagctttccgggggatggacttgtgggggcggtgatcgagggaagaggactgccgggaacgatccgggcggacagggtggagttctttcataacgccagtgacgctttagaggcggtgaatcgcggtgagattgactttgtttatggtttggcttcctacatggaatacgaaattcaaaaaaatcattttaccaatgtagtccctgtaactcttgtcaatgatcgtatggatgtcagctttgcactggcgaaaccggctgatccggagctgcttacgattatcaataaggcagtcaacagtatatcgagtgacagaagaaatgaactgatggaccagaatctgatctccgtgggatcgggacagctctcccttaccgaacttatttatgcaaatccttttatgtttattggagttttaacaaccctccttctgatcctggttacttcagtcctgtggtttaaccgtatgcgtgtaaaatcggcggttatgcagagcagcttagagaaggcggaagcggagaaccgggcaaagggagcgtttctttcccgcatgagtcatgagctcaggacgcctatgaatgctgtggtaggtctggcggagctggccggtatgacagaaggagtaccggaaaatgtccgtgaaatgcttgtcaaacttcgcgcctcttcccattatctgctggatctgatcaacgatattctggatatgagccgcctggacagcgggatgctggaaacggccagcgaaccgttttcgctggaggagctgttgggagagcttcgaacgatgatggagacggaggcagggaaacgcgggttgatctgtgagatggaggcagacgttgatcacagcagagtaaccggtgattccatacgcctgagacaggttttgatgaatctgctgtccaatgcatttaaatttaccccggaaggcggtaccgtgactctgcgtgtgaccgaaaaaacgggcgtcaatgggagcgcggacttcgattttcgtgtgacagataccggagtggggattgctcctgaggatcaggagcgtatcttcgatacctttgaacagatggggacaaactactccaggagccaggggaccggccttgggctgccgatcagccgcagcattgtacagctgatgggcggcgaactgcgtgtgaagagtgaaccggggcacggcagtgagttctattttacacttacgctgccgttggacagtcttttcgaggaatgtgaggacgggaacccgatggtgacagaagacaatctgttagaaggagtcagaatcctgctggccgaagacaacgatttaaatgcagagatcgccatgcagcttctggagttaaagggagcgcaggtgagccggagtgaaaacggcagactggcggcagaacgatttgcagccagtgcgccgggagagtttcaggcgatccttatggatatccagatgccggagatgaacgggctggaagctgcccgggcgatacgggccatggaccgaccggatgccgccgttatcccgatagtagcgatgactgcaaatgtgttcaaagaggatgtggatgcggctatggaagccggaatgaatggctttgaggggaaaccgctggatgtagaacatctttaccggcagctttgcagacttcttgggatcgatacggaatgatgaaatggcagcttaaaaaaccagttttggaatggtgaattccaaaactggttttttagtggacaagaggctttgagcgtaaacgcatttgcctatgtggtggcctgctcgtttgctttctgcatttttctgtagaaaaacagcagatgattcatgtgggcagtgcttctctggaaaccgccgctgcggtttctggcggaccagagagtatagtgaaccttcagaatatcgtccagatcatcgaacagaaccgccatttcacgggagaaggccccggggtcatctctgagcacggtcatggtgtaatacagatgaatcccatggcgtaccatacggagaccgttttccatctcccggcggatcagctcgccgtcggcacaggccagggctgcttccgagacctccttttccacctggtccagatattccttcatggcggcaaagtcgatacagatcgcaggttcccggggaggaatggcgttcgtttttgcaatgttggcggaaagagtcaggagccgctccatcttcgcatcgaattcctcaatggattcataagtgtatttgctggacatgactgcgaatgccagcgtggtgttgtacagcggcgcatgctctaagtggtagtagttgccaaggtcccaggcagtctggaaggcgttttctgcggggctttcatagatgaaacggttgcagaaccaggccgttaaatcagaatcgctttcgggtccgctccaggaacaagcggccgtataggcgaatccggggtagctggcgcttaagtactgccagtggcctaaatcgccccaatcggtggtgataattccgagaccgccatatcggatggcacaggaagcggcgtcccggatgttttttgccatattgtcagagcgcccggtcagggatccccaggaactggttccggggcagagacagtaatttaaaccggtcttctgcatcagtctggcatggtcttcaaaatgggcatcgccctcgtagatccagtccagcaggatggcatcctttggaaaacgggatacgcaatccgggtggtgcaggatctcatcgccccacatgagcattctttttccgcgggaggcgcagtaagcgtgcagcttttccacatattcaaagtacaggttcaggcggccttccttttcggcggcctgcttattctttcccatccccagctcaaacggttcatccatgttgacattgatacagccggaggaggagacatccatcagagtgcctaaaagtgtttccgccagttcgaagcttcggctgtcgcggacatccagggtcatcggcggccgccagaagagattttcaaagatatacccgtcctcacattctgcaagactgcgaaactgcggtttttccaaccatttttccatgtggcccaggacgttttggttgggtacgagatcgataaaatgagctctggcatactgggaaagttcccggaattcctccggcgtcaccggtgtctcgttggtaaaaagatagtgaaaatcctcgtaatcaaaactgaatccttccatatacaactgaagatggttgattctcatggaagcaaataagtcaatcagtcctttaagcgtctccatggaagggattttgtcacggccgatatcgagcatgatccctcggacggaaagggacggttcatccgcaatctctgcacagggaagaacaccgtctgcctgcgcagccagctggaccagtacgcccagtgcatagaagtaaccggcgccatcctggcaggtgatccgtattccatcggaactgatgcatatatgaaagctttccggaggacaggtaacgtattccgcagccaatgtgatcccgtccggcgagtagccgccgggaaaagcttctgcgagaagggcggcggggtcgaaaccggcgtcccggcaggaggcttcgatctcaggtgcggtggtcacggcgccatatctgatgccggaaatggtattctgctgaaacgtgcattgttttggtgcagggaaaattcggtacatcttatatacctcctaacatttatccagatgtgagactgacagcggcagcgggaaccagttgacggaataaagcggggaagacggttctctgccataaaaggaagccggagagaacagaagatctaccgcttctacatcgctcatgcagagatccggtgtatccccgcacggcgataccgtaatttcgccgtgggatactgtgacagccagtgcggatctgccgccgatttgcagaacgaggcggccgtcggttaaaggttctgactccgatttgatggaaaggaagaaccggattgcgtcactgtagttgaatattcggtaattatcttcttcccgtaccgaaaaacgttcatagaaaccggatataccgcggattcgttctgtgtcataggaagggactgcaagcgtaaaggcgtcacagccgtggagtgtgctccatgccttcagggcggagaacagcattgcttcatccgtcagaaccagttcgtaaatatggtccttagtaccgcagaggtaaccggctgcggtgccttcgcattctactgcgtacagcccgctgccccagctggtgcagaccgggaagaaatcctgctccgacctgacggtatgtaccggcagcaaagcatacatgcggctcagcttctcaatcagagcggtatccccggcggttaccggctgcagcgtgatcggaatatcaggatagcgggacgcgcagtgacggaaattatcagagatgaatcggtattccagataatgaccgccgggttcatagccgtaatactgatagcggtgacgccttccatccagaatgcctaaggtaatcccctggcgttccatatcgtcagcggccatggccatcagctgcttcatatagcctttcccccggctgtaaggatgaaccgagacgctgcccacggtggcacaggtaatggtatggccgctgtgctccagggtaatgggaaggacgcagacgacagcgcgtatctggccgtcttctttagccagatagtggcaccattcggtctggcggtccgttccgtaaagtttgggtaagagggtccggaagttatgagggacccggtgcatgctgaataccatattgatgaagtccagaatctccggaagttctcccggctggcccttgcaatagacggtcatgagacaaatctcctttctgtttcaaacacattctgagcatctgcagccacgcaatggcacggcggcctgacagctgctgttatgcagcaccaaaagaaaaatattcctaaaagtatgaaaaaagcataaaaacagattaaaatttagataccatccatgttagcacaatttgggaagcaacacaatataaaagtaaaaaaatcaaaaatattaggaaagttccataatataaggtgagtaaatacggcatattgactatattgacagataggaaagaaacgtgtacgataaagaaaaatattaaaaaaagtatgaaaaaggagaagcaatatgtcaaagattgtatttgttcctttggatgaacggccctgcaactatctgtatcctgattatatcgggcggatgagcggactggacttaaggatacctccgaaggaaattctgggagattttaaaaaagaggccgatgtggaagctgtatgggaatggacgaaaggacaggtaaagggggcctcccatctcgtggtatccatggatatgctgttatacggaggcattgtaccatcgagactccatcatctgccggaggcggtctgtgaggaacggctggaacgcttaaaggagatcagggggctggagccggatattcaggtatatggttttcagctgattaccagggctccggccagagatggcagcggggaagaaccggattattatgaggattacggataccgtattttccgttacggagtaatccgggataaggagtcggtaaatgcggccacacccgaggaactggaagaactggagacgatctgccgggaagtaccggaggagtatctaaatgattttttggaacgccgccgcgtaaattatcataaccatattcgaaccatcgaactggtggaggagggcgtcatcgactatatgataattcctctggatgactgccgggagtacggttatgctccctctgagcggaaaaaactcagctctgttatggcgaagaaaaacctgctttcccgcatagccatgtatccgggagcggacgagatcggctgtacactgcttgccagggcgattaacgggcagagcggactgacacctgccgtttatgtggattactcttctctgcggggaaagacacagattccttcctatgaggaccgaagcatcggcgagacggttctgtcccatttgctggcggcaggctgcagcgaggcggagacctcggccgaagcagactttgtgctggcggtcaacccgccgacaccattcagtttaaaactggaaaaagaaatccttactgacgatattatcctggagagtgagaggaatctgtctgcttttctggcaagaatcaggaaataccggacaagagggctggcggcaggcgttgccgactgcgccattcccaatggggctgaccgggcgctgatgcagtttttatacgaacaggatatgctgaaagagctggccgcctacggcggctggaatacctcatccaatacccttggaacggtactgtcccatctttgtgcgtggaacgcggcggagaggctgggacgcttaactggagaagcgcgtgaggcttccgaagaattcctgttcttccggtatctggaggactgggggtatatggcggaggtgcgcagagacgttaccgaccatctgacggatatcgatccggagctgaaccgtcttgacttaagggataaggagcctgtggtccgggagattgtgaagaagaggctggaagagttccaggcgaagtattttccgaaggaaccataccggtttgaactgaggatgccgtggaatcggatgtttgaggtagagattagtctttatcgataattaagaaaaatatgttgtgacattgctgcctgaaccgttgcaatatgttttttccagtttaaaaatgtgccataattatcgatgtatttgcttatctcccatgataaaatatttatgtatagtcgaacagaagtcagaggatagctggtaactataaattactgtagcaatccgaagcgcaatcatcagacgcacgaaagtcttttgattacttctaagtaaattagacacggagggtttggatttttcaagccctctttttgagttcatcatcagctcaaagtattgaatgacttttcaagggcgaatgatttccgcggacagtgagcctaacggacacgctgaaggcgcggtttgatttttttacaataatagattcccatgcagaccgcagcggttccccaggtgacgggatagccgagatacagggtgtagatggacgggaagaagggaatcatgatcgtcagccagaggattctgaggccgcataaattcaggattgacaaaagcatggtactgaaggtgtcccctgcgcccctggcggttccaatcaggatctgacatgtgatcagcagaatgtagcctggtcccagcacctgacccatcatggctccataatggacgacctcagggtcggcggtgaagagccggagcggccctgcgctgaagaagaagagcaggattccaatggcggctgcgtagaggttgccgagccacaaaaactgtttaaatccttgctttacacggtcaaactttcttgctcccatgttctgggcgatgtaggtggtcgtggtcagagagaggcagttggcagggagaagggcaaagctgtccactttcccgtaaatgttgctgccggccatggccagagaaccaaaaccgtttaaatagctctgcacaatgacgttggacagggaggtgacggcagtctgaaggcctgtgggaatgccgaattttaatatcttaatcagcatggccttatcggaatgaatctttgatggaatcaggcggtaaatgtcatcggtatgagtcagcttccataacacacaggcggccgagaccagctgtgcgattaaggtggccagcgcgactcccagcacggccatatgaaagactgtgacaaagacaatatccagcaccacgttaatgacagaggaaaggcagaggcagtaaagcggatgcttcgtatctcccgccgcctgcagagtgccggcccccatgttgtaaaggatattaaagagtgctccaagaaaatagacgcgcagatagagcgctgcgtccgggatgacggaagagggggtgttcatagcggttaaaataaggggagagagaagacagcctgcgatagaaaccagaattcctcccaggatacagaagcagaaagaagtatggacggctgaatgaagccgggtaccatctccggcgccgtaatactgtgcgatgatgattccggcaccggtagtcaggccgatgatgaagccgatgaacaaattaataatctgggcgctggcgccaatagcggccagcgcaccgctgcctacgaaattgcctacgataaaggaatctgtagtgttgtaaagctgctgaaacaggttcccaatgatgagggggcctgtgaacagcagaatcgatcgggttatgggcccttcagtcagtgaagcagatggtcgctccttcataatcctgtctcccgcctgtcctctcaggtctggtcgctgtcagacgaatccgactggctgcggctgctttcaaggtaattataaaaggtaaatttgctgattcccagaagttcacagatctgttccccggacttcgtgatgaggaatgctcctttctggtcaaggaaacggataaactcaatcttctcgttcttgttcatctccagcgcaggctttccgatctgttcctgtcccatctgaatcagatggctgagaagattattcacgtcgggagcgaaaatctcctcgtcgttggaagtaaagctgtcaaactggttaaactggcgtaaatacccttcaaactgaagtgtctctgtgatatccaggttcacgcagatcgatccgatgacctcgccctgatcattttttagatagatcgatgaggaacggagaatctttccgtcctgtgtggtggtaacatagttaaaacgatccccatccagcacggttccgcgcaggacttccagccctaagttgcttccgcagcccccgatggaacggtgggtgatgtctccgtttcggatatcgacaatggtatggttgtaatcctttgtcagatcatgaagcacgatttcgcatttgttaccgaagtgctgctctactaatgtgagaagctgctgaagtataggcataatttcatcaagggttttcatggtaatcacctctcaaatatgaaaaaaaataagaatatagttgcgaatactgtttgtagactcagtatatcatattaaaagtttttaaacaatagagaaatcagaaaaaaagtatgggatttcggctgtgtactggcttcgctggataaaaatgcgtatggatattatgttaaaggggatagctggtggtgtagacaagttggaaactaatgatgtaagtgtgtgccgcagctttcgccgataatgagttcgggggggaaggttattctggcgttttctgtggagccctgtatggactggatcagggtgcggacaaccatctgtccccagcgccggctgtggtgatggatgctggtgagacggggcatcgtgtagtcggcaaagtaaaaacggtcgcagctgatgagggccacgtcgcgggggacggagaggccgtgatcggcaaatgcacggatagcgccaagcgccacattgtcattcatggcgatcacggcggtgaagggcgtctccctcgttagaagtgcttctgcagcctggtatccgtccggcagatagtaatcagatagagatattaagtcttcctgtaccgcactgccggaggaggcagccgcttttttatatgcttccagacgggtctccgtgatggtgacgccgggctggccgccggcaaaggcgatatgcttgtggcccagtgaggcgaggtaattgtaggcggtgacgactccgcttccattttctgaatcaagaaagatacagtcgacgccggggattgccctgcctgccgctacgaccggaatggaggcggccagcttattcagcgcctccttataggcgggattgggctcgaccatgtccagctggccgccgataatcagtattccatctacttttttgtccatcatcatgcggaaatatccggtctcgtcgatcggtgaatccccatgatgaaaacgggtgttgcacagataaacagagtatccctcctcggcggcacacctctggacttcctgaaaaatggttgcgaaatagggattggtgatatccggcagaatgacgcccagcgtcatggttctcttcgatatcaatccccgggcgagcgcgttcggcgtaaagtcatattttctgaccaccgcttcgatgcgggcctttttatcggcggaaaccggtacttttccatttagaaaacgggagacggtggcgacagagacaccgctttcctgggcgatctgggtaattgttatattggatttcataatcagcccctccaaaatatgcttgaatcccacggacgaagaaccgggggtcttcccagtataacacggacgaaatgaaattgcaatgaaacccttttcacaaaaatatcaaatgaaatttatgaaatatcacgaattgacaagaaaaagaacggatggtatcgtaaaaatatgaaaaggttttcataaactcatgcgaagcgtgtggagaaagggagtaaaagaaatggatacatatctgggaattgattacggcggaaccaagcttctgattggggaggtccgggaggatggggtgcttttgaagtacaggaggtatccgaccgggcttacggggcaggaggagattgccgctcatctgcttcagtgtctcgataactacgtagcggaggaggctccggaaggaagaatccgaggggcaggaatcggtattgtagggatcagcgattttaagaatgggatctggcattcggtgaatcatgaagaagggataccgctccctctggcgcagatggccgctgagcggcttggagtggagacggggatcgacaacgacgtcaggagcgcggctgtagcggagcttttgtggggagaaggaaagaactgctctgatttcatatatgtcaatgcgggaaccgggctggctgccggatttgtaatcgatgggaaggtgctgcatggggctcactgtgatgccggggaaattggccatatggttgtggattacaggagcagcagaaactgtgtctgtggacgaaagggctgctgtgagcttacggcttccggaatcgggattcacaggatggtcgaagagagacgggctgatgctccggctgaactcctggagctggggaagagcgggagatatccggcggcggccgtattccgcatggccagagaaggcagtgaattctgtctatccatcgcagaggaggcggcctcagtgctgggctgcaccattatgaatctggtgcgcatgtcagaccccgatatggtggtggccggaggcggactgatgtcggatccgtggttctttcagcgcgtggaaggatatttggagaaagtgaccatgcgccatgtatcaaaagggttccgggtatcaggcttcgccccggcattttccggcgtaatcggcgctgcggctgtaggatgcctgaaaagcgggagagagggaagaaaaatcatttagaaagatagaatttataacatcagatttttgacaaaggagattaaatcatgaagataacgattgcagaaacagaaaaacaatttgacgaaacaggtgcctggagaataatcggacagattctggccaggaaaaattccgttatcggcctttctaccgggcagacgacgactaatatgcacagaattgtcagcgaattatacaagctccatccctttgatgtgtcagaaaccgtcttctttaatgtggatgaactgacgaatctgccgcggagttacgagggcagctgctacgccatgattcgcagccagcttttagaccacctgggagtaccggatgagcgctttttgatgccgcttacggagagcgacgatttcgaactggagagcagaaaatttgagaacagtatcagagagcacggcggcgcggatctgcagattctgggaatcggctggaacggccatattggaatcaatcagccgggaactccatttggcagtgatacctgggtgtcgcctatggatgagatctttgaagccagagtgcgaagagagacagcagtgcccgatgatcatgaactgggtggcctgaccctgggaattaagaccatcatgcaaagcaggaggattattctggcggccaaaggagaaaagaaggcagagatcataaggcaggcgctggaaggcccggtgaccgaggcggttccggcctccattctgcagctgcatccgaactgtgaggtactcctggaccgtgaggcagcaggtgcattgatgcgcaagaccatttaaaaacgctgggctggccgggaacagtgacaactcttgaaaatgcagagtgatgcagaaaggacaaatatgcagataaatacagagtttcagcaggaactggaagagagcggttatattcacagaccgctgcctctccatgaagaagtttctctggaacagagggaaaaggaaaagaaggtgacggcgagaaagaccgtgtggagcggagatggaaagggctgctgcggggatcctgtatctatggagcgggggacggtggaaaccgtccggctggaggcggaaactgttctggcaatggaggcacctctcctgtgccggtgctggccggaaggaatgcctcaggacggggactgtgcctattacggccatattcacgccgcatttccggtgaaagagacggactggacttcgtttcaccgtgtacgggccctgatcaggccggagtgtgacggagcgagaaccgtcagcctttccatgtatctggaaaatgacggcgagcgtaaggttccggaccggtacagacggcagggatttcacatgatgaatttaaagaatcaccagtggaatgactgtatctgggaatttccgtctctgccccgtgactgcgtgagcggatttggcttccgttaccggatcaatggacgggacaccgcaagcggtgagacggccgccttctttgtgaagaaaatctggctggaggccgtggaacatccgggaaaggagagcggctggctcccggagcggaacaccgtgtgctattccacctgcggttatgagaccggagcagtgaaacgggcggtgctggctgaggaggcggaaacatttataattgaggaccggagcggcagaatttgtctgaaaaaaagcctggaacatgtagtctggaaggaagatgccttccggattgccgacttttcagagctgactcaggaaggcgagtacagaatccaggcggggaatgtgaccggagactggttcccggtcagagacggtgttctggatgaggtgacgtggaaagggataaattttctgttctgcgaacggtgtggttatccggttccgggcaagcatggactctgccacatggatgtttacgcagaacataatggggtaaagctgccatactgcggcggctggcatgatgcaggagatatgtcccagcagacagtccagacggcagagacggtagaaagcctgctggagcttgccgcagagcggagagggaacacgctgctgtaccagagactgatggaagaagccctgtggggacttgaatttatcttccggacgagatttggagacggttaccgggcttccagtatcggcctgatccgatggaccgacggaaaaataggcaatgatgacgatgcagccaatgttcgggttcacaaccatgcacttgagaattttatctgcgcgggagtctttgcactggctgccgagtgtctgcgggattatgacggtgagctggcctggcggtgtgcgaaggcagccgaggaggattttggatttgccatggaacgctgccggactcacggaatggagctgccggtaccatgggaacatacatactcttcatctgcagcactcttttacggagaaatcgtgacagccgcggtcagaatctggaaggtaacgggaaaagaggtgtatgaaacggctgcggctgagtatggaagaaaacttctggactgccaggagaaggagtcatcagagacagggctgcgcggtttcttctacagggatgagacccatcgcgatatcgtccactataatcaccaggccagggagcatgttccggtcacggcccttgtgctgctgtgccggctgttggattcccattccgataagatgctgtgggaagaggggatccgcctgtacggcgagtatgtgagagacttaatggcctgtgcctccccttatgaaatgctgccggccggcctctattccgagacggcggaggatcaggagcttttccgtctccttcatctgcagacagattatgagacagagaaagaaaatcacacccttcaggtgagggcgggaatgagtgtcccaaccggcactgggggaaaatcaggctatggagtccgccagtttccggtatggttctccttccgaggcaacaccgcggtgatgctgtcggcggcaaaaggggctgccgctgcaggcggatatttaaatgacgcattccttatggaagccgcagcctcccagaccgactggctgttcgggaaaaatccgtttgggcggtctcttatgtacggtgtgggtaccggatatcagcagcttttctccactttccccggcatctgtgtggggcagctgcctgtgggaatcgagacggacggcaattccgatgtcccgtactggcccggcggcaaccagtctacctataaagaagtctgggtcacgtcagttgccaaattgtttgcaataattgcggaaatatataaaaatcagacataaagtatgaaaaagcaaactaaaaaacatgtaaagaaaagtgaagaattaaaaaaagtaagctgttaattaaaaaaagtgataaaaaagtccaaaaaaaagaaaaaaaatacttgaaaactaacaaaaagtatgatattctaaaatcaccaaaagaaaaaaagatttttaaaagcataaaaaaagtttgaaaaatatgacgaatattaataactgattttatgcaaaaaaaggaggagaattatatgaagaagagatttatgtcctgtctgctggcgactgctatggtgattacatcactgacagcgtgcgggggaggaaagagtaccacaaccgacaccactgcagctgcaggcggagagacagcagagacaaccgccggagagacagcaggggacacaaaggccgagagcggtgacaggaagaaagtcgtattctggtattcccacacaggtgatgaggcaacctgctttgaaaatgcgattaaggcttacaatgagagccaggacaagtatttcgtagagggcttgagcgtatctgataagcagaagatcatcgttgccatctccggtaatgaagcgcctgacgttattgaagtctccaaccaggatgtcctggcgtacgccaccaacggactggtagagtccattaccgatctggccgcagctgataattacgatctgacaggagtattttccaatcagtctctcgtagccaacacactgaacgacactgtatacggtgcaccgctggcatccatgattatccagatgttctataataaggacattcttgaggagatcggctacacagagcctccgaagaccatggaagagctgtacgagatggcggtaaaggctacggaggttgacgataagggaaccatcacgagactgggctacccgttattcccgctggcaagcgcaagacaggaactgatctatgccttcggcggaaagtggtggtcagatgacggattaaccctgacgccggatgatccggctatccttgacagccttaagatgaacatcgactacagaagccagtacggaatcgagaaggtacaggaattcgtcgcaacggccaataccaaccgctatacggaaaatgacatgttctttgcaggtaagcagttattccgttttgacggaacctggatggcagccatgatgaagaactttaactccgatgtcaactatggcgtggcgctgatcccgggaacggaagcacatccggagatcgcaggtaccagccgttatgagacaaactccttaagcattccgatcgtagcaaatgaaaaagaaggcgcatgggatttcgttaagtacttcactaattctgaggcaacaaaggaactgttaatcggtatggcaaatctgccgacacagcttgcattatatgatgatccggatattctggcacagccgaatttcgatatgttcattgaggctcttaagacagaaaacggtattcagtacgccaagattgaagatctggcaaaatatacttccttaattgaagagtatcttgactatgcttacaatggcatgcagacgccggaggaggccatgaagggccttgccgaccaggcgaagatgcttcagtaacagagttaccgcgggttttttgtgacttccgcttcgctgcactcacaaaaaacacctcgcggagctgtccgtgcaaagcaaaagaatatcacatatgatgccgaagcacatatgtgatattcttttataaggggccttttcataatgttttccgatctcacacatcagaaaggagtagtccaatgtcaaaaccgactgccaagaaaatgagcaaatcagaacggcgggacaatatcaatggatttctgttcgcacttccatggattattggattcgtatgtttcagtctgataccgctgctcacctcgttttactatagcttcacatccttcaatccggtgaagccgccggaatggatcggccttgagaatttcaaatatatttttaaggacccgcttgtgttcaagagtctgaaaaatactctctttatggcctttgtatccactccgattaacctgtttattgcaatgctccttgcttccttattaaatagtaagtttaagggcagaggcgtggcaagaactattttcttcatgccttccatcatcccgatggttgcagctaccatggtatggatctggatgtttgatcctacatacggctatatcaaccgcgtgctggagatgatcggaatcaacggcccctcgtggctggttaacccggcctacacaaaatgggcgctggtattgatgggaacgtggtgcaccggtacgacgatgctgatctgccttgcggctctccaggatgtgccgaacagctattacgaggcggccgagatcgacggagcgaacgcttttgacaagtttttccggattacgatgccgtgtgtggcgccggttctggtgtaccaggggattttgaatatcatcaactcgttccagtattttactcaggtatacgttatcatcaacgccagctccggcggcggtgccagcaacgccagcggcggaccggccaactcgatcttaatgtatcctctgtatctgtttaacaccgcattctcttatatgaagatgggcagagcttccgctatggcatggcttctgtttgtcattgtgtttgtgctgacactggtcatgaccagaatcacgaagaaggtatccgagaatggcgtagggggtgaataagtatgaaaaacaatcacgcatattataaaaaacgtttaaaaccgattccgaagtatattcttgttattgtgctgagttttatcttcttttcaccgtttttaatcatggtgacaacggctcttaagacaaacgcggatgccttccagctgccggtaaagctgtttccgagggaggtcatctggaacaatttcccggaagccatggcaaagataccgtatgtaagatatatgatgaacacgattttcatcacgcttctttccgtaataggacagatggtagccaccccgctggtagcctattccctggccaagatcaagtggaaaggcgctcccatcatctctgccctgattatggggacgatgatgattccttatacggtaaccatgattccgttatataagatctggtccagactgggatttaccaatacatacgtaccgctgattctgcctaccttctttggcagtccgttctacattatcatcatgagacagttttttgcaggtcttcccaattccctgatggaggcggcaaagatcgacggtgcgggtgaattcaaacgctacatcgccattgcgcttccgctctcaagacctgccctgacgaccgttggtatctatgcgtttatcaatgcctggtccgattacttagcaccgcttatctatatcaacaagacggaaaaactgacgctgtccttaggtctgcagggcttcttaaaccagtattcggttgactggacgcacctgatggcggcggcaaccatattcgtaattccggtcgtaatcttcttcctgttcttccagaggaactttgtagagggcattgcaacgtccggtattaagggctgatacattttttgaagaggagcagactatggaacatcgaattacgctgaatggcacctggaactggtgcgatacggaaacgaaggaatggcataagggatctgtcccgggaaccgttttgaccgatatggcggacggaggccttatcgaggatccctattggcggacgaatgagtatgagacacgggagctttcccgcagagattaccgatatgagagagaatttgaagtgccggacagctttttccgggagacggagcagtgcctcgtgttcgaggggcttgataccattgcagacatttatttaaacgatgaactgctccttgcagtcagggatatgcaccgcacctggagaattgatgtaaagggaaagctaaagacggtaaaccggctggctgttatctttcattctcctatcgcctttattgaaaaggcggaccgggaaggggacatcttttatgcttccacaggctgcatgaagggaaacggagcactcagaaaggcccactacatgtttggctgggactggggtcctcagctgccggatgccggaattttccgcagcgtctatctgtccggatattcgggcgcccgtctggaggatgtgagggtccgccaggagcatggagataccggggtgaagctgtcgcttgagagcagtgtgagaatgcctggcagaagtgaaacgtctgaagcctatacgcttgcatgcgaaattacggcgccggatggaaccgggatttttgtcagccagaccgttcatcccggcagcacggcctgtacttcggaaacgatagaagcacttatcgaggacccgcagctgtggtggccgaatggatacggcgaacagccactgtatacggtgcgggcagaactgaaagcagcgggcgctgttctcgatgtatgggaaagaaccatcggattgaggactgtcactgtctgcacggacgcagatgaatggggcaatcagtttgcctttgtggtcaacggccagaagatatttgccatgggcgccaactatataccggaagataatctcctcggccatttgagtgaagagcggagcgaacggctcatccgtgactgcgccagggctaattttaactgtatccgaatctggggcggcggctattatccggaggattatgtgtacgatgcctgtgaccggtacggtattctggtctggcaggacttgatgtttgcctgcaatgtctatgatttaaacgatgaatttgaagctgatattctggctgaaacggccgataatgtaaaacggatccgccatcacgcctgcctcgccttatggtgcggcaacaatgagatggaatggggctggcgcgactggggacgtctggagggacacaggccgaaatacaaagcggactatacgaagattttcgagatgcttctgccccgcctggtaaaacaggtggatgatcagacgtattactggctgtcttcgccatcgtcaggcggatcgttcgacgatcccaatgattttaaccgtggtgacaaccactactgggaggtatggcattccaacaagccgtttacggagtaccgggatttctatttccggttctgttcagagttcggattccagtcattcccgggaaagaagaccctggatgcattcagcctgccggaggatcagaatatcttcagcgaggtcatggaatcacatcagaagaatggccttgccaacacgaagattttctcctatatctccggttactataagtatccgaaggatatggagagcatcgcctatatttcccagattcttcagctgaaggcgattcagtacggcgtggaacactggagaaggaactggggacggtgcatgggttccatctactggcagttaaatgactgctggccggtggcttcctgggccagcgttgattattacggacgctggaaagcactccattacggagcaaggcggttctacgcccgttttatggcaacagcctgtgaaaaggaagaactgagtaccgatatcggctactatattcacaatgaatcctttgaggagagaaaagccgtattggtggtccgcctcttcgaccgtgatttccatacactgtatgagacggagacagaggctgagaccgggccctttgaggtgaaacaagtgctgaccatggattttgccccgttcctggcagaagaaggaatgaaaaagaaagcggtggcagaataccgtctgatcgaggatggccgtgtggtaagccggggaacgacgctttttgtgaaaccgaaatacttcgaattccagaagccggaataccggatttctgtgacagagagggaagatgtattctgtattcacgttgatgcagatacgtatgtaagttatgcggaactgagcatggatgagtatgatgttatatttgaagacaatttcttcgatatcacatcggaagagggcgtggacataactgtggataaaaaggaattcccgaaccggataacggcagaggaagcagcggctgcgcttcacatcagaagtgtggcggacagcttttaaagggaggaatcacgtatgcagaaagaattactggatcagctggagacaccctgcgttgtaatcgatatggctaaagcagaggaaaatgtgatacggatgcaggcggaggcggatgcggccggatgcagactgagaccgcatatcaagacacacaagatgccgctctttgccagaatgcagctggctcacggagccgcaggcatcacctgtgcgaaggtgtcagaggcggaggtgatggcagacgggggcgcggatgatatttttatcgcctatcccatggttggcggcttcaggataaaaagggccatcgccctggccaggcgtttaaaacgcctgattctggcggtggacagtatggaatgcgcggtgccgttaaatgaagctgcaaaggccgcgggcattactctggaggttcgtctggaggtggacaccggggcaaagagaaccggtgtccagaggacgaaggccgctgaactggcgaaggaagtccatcagctttccaatttaaacctgaccggcatatatacctttaagagtcttgtctatcacgatgagcccaccgaggataaagtgatcgcgggggccgaggaaggcgatatgatggaggccatagcggatgagatcaggaaggccggcgttcccatcgcagagatcagtgcaggttccacccctacgggtgtggaggttgcaaagacgggaaaggtggatgagatccgcccggggacatatatattcaaggatcacatgctttgcaaagagggggcggccgaaccggaggacattgccgtgaggatctatgccacggttgtcagcactccatgcagggagtacgcggtgattgatggagggacgaagacgtttcccatggatatcctgctggatacgcctccgtactgctacccgggatacgcgctgattgcagggaatgacgatcttcagctccgccgaatgaatgaggaacacgggatcatcaccagcaaaaagggagataccggattgaaggtcggcgacaaggtggagcttattccgattcacgtatgtactgccattaatatgcagaattcagtctatctctatgatggagagacgctgcgtcaggaagtggtggcagcgagagggatgctggtatgagaacgctgataaagaatggactggtctatgacggaagcggtgataagccgttccggaaggacatactgataagagatggcgtcattgaggcggtgacagagaacgcggaaacggccgggacggaagcacccccggcagattctggcgggctggaggttatcgatgcaaaaggactcgttgtgacgccgggatttatcgatacacacagacactgtgacatcgatgccctgtacaatccggaattcgggcggctggagatggcgcaggggcttacgaccgtgatcggaggaaactgcggcctggcgccgattccggcgccgaagcagtaccgccgggctatttatgattttattgagccgtgccttggcattgcacccgaagaaatggctttggagcggttcagtgattacctggaggaacttggaaaacgggaccttccgcttcatgtgggcagcctgattgcaacgggtacgctgaaggctgccattaagggatatgggaaagggccgtttaccggaccggagatggagcaggcaaaggcttatatccgcgaggggcttgaagccggggcggccgggctttccatgggtatcatgtaccagccggaatgctattctgcgagggcggagatacaggaactgataagcgctgcagcacccttcggccggcctctggcctgccacatccggggagaaggggataatctggtctcctccgtgaaagaggtaatcgaggtcacaggggcagccggggttcctttaaacatcagccatttcaaggctaccggagtgaaaaactggggcagtgagatttataaggcgattgaactgatcgacgccgccagagcggcaggccaggatgtaaccgtggatttttatccctactgcggcggctccaccacactgatcagtctgctgcctccggccgtaatggaagacagcgtggagatgacgcttaagaaactgggaacggaacgcgggaaggaagaactgcggcgtgaaatttaccgggaacatacaggctgggacaatatggtgactgccataggctgggagcgcattctgctgagctccgtgacgaaagaggcgaaccggaaattcacaggaaagaatttccgggaagctgcatctctggccggatatgaagagccggctgatttctgcagcgacttactggcagaggaacagggaaaggtgggaattatcgttctctccatgtcccaggaggatgtggatacggtagccagacttccgtattccatggtgatctccgattccctgtatggtgtgagcgactgcccgcatcccagactttacggttcctttccgaaaattatcagggaatacgtcagggaacggggcattctgacgatggaggaagccgtgaagaagatgacgcttctgcctgcaaagcggctgtctctcgagggaagaggtatgataaaagagggttaccatgcagatattaacgtgtttgatcctgaaaaggtcagggattatgcggtttatgaaaatccaaaacagctgtgcagcggatttcggatgataatggttgacggaacgattgctgtttccgacgatcttttattgaaaagaaactgcggcagtgttataaaattatagtatcacagaaaatgtagaagaatgagggaatgaatgatgaatgacgtatatgcaaagttaaaagaattagggctggaacttccgaaggcacctgcaaaaggcggagtttactcctcctccagagtgtttgcgggcaatctcgtgtatatctccggctgcggccctgttatcgacagcccggtggcaggcaaggttggtaaggaatatacaaaggaagaggcgcaggtcttctccaggaattccatgttaaacgtgctggctgtgctgcaggaccggatcggtgatttaaacaaggtaaaacaggccgtgaagatcctggtctatgtggccagcgatgatgacttctatgagcagccatacgttgcaaacggcggttcccagcttctcgtggacttattcggcgaggaggcgggagcgccgaccagatccgcggtaggcatgaacgtgctgccgggtaatattccggtggagacagaggctattttcgaaatcgaagaataagccgcagggatacaaggagagcgaaatggaaccggtatatttggatgagagcaggacagatgaagagagagtgcgggacttagtgtcacagatgacgctggaggaaaaggtttcccagctccgttacgatgccccggcggtggagcgcctgggcattcccagctataactggtggaatgaggcgctgcatggcgtagccagagccggggcggctacggtatttccgcaggctattggattggcagcaatgtttgatgaggcgcttctggagaaaatcggtgatgtgactgctctcgagggacgggcaaaataccacgaggccgtgaggaacggggaccgggggctttataagggaattaccttctggtctcccaatatcaacattttccgcgatccgagatggggacggggacatgagacatacggagaggacccgtgtctgacggggcgtatgggaaccgcctatattaaggggatgcagggcaatggaaagagactgaaggcggcagcctgtgtgaagcattttgcagcacattcggggccggaaaagggacgtcattcctttaacagcgtggtaagcaaaaaggatctgacggagacgtattttccggcatttgagcggtgtgtgaaggaggccggagtcgaaggcgtgatggggggctacaaccggctgaacggtgaggcggcctgcggaagtcatcatctgatcgcagaaatcctgagagaaaaatgggggtttgacggttactatgtatcagactgcggtgcgatcaaggacttccatatgcatcacggcctgacggatacacctcaggaatccgcggccctggctcttaagagcggctgcgatttaaactgcggcgccgtgtatctccatgtgatgagcgcctataaccagggcctggtgtccgcagaagatatcgacagagcggttacccatttgatgatgacaaggatgaggcttggaatgttcgatcaacatacggaattcgatgagattccgtatgagatcaatgactgcgccgaacatcacggtcttgccctaaaagcggcggaagaatccatggtacttttaaagaatgacggaattcttcccctcgataagactgcacttaagacggtggctgtgatcggaccaaacggtgacagcgaggagatcctgaagggaaattacaatggaacggcgacagagaaatacacgattctggaaggaatacgggcggtgcttgggaaagaaaccagaatattctgttcagaaggctcccatctttaccgtgacaacgtggaaaatctggcggaagcggatgaccggctgaaagaggcggtttccatggcggtgcggagtgatgttgtgttcctgtgcctgggattaaacggaacactggaaggcgaggagggcgatgccaacaacagctatgccggtgcagacaaggcggatttgaaccttccggagtcccagatgagactcttaaaagcagtttgcgggacgggaacaccggtgattctgcttctcgctgcgggaagtgccatggccataaactatgcggctgagcattgcagcgccattcttcacatatggtatcccggacagatgggaggtctggcggcggcgaggcttctgacaggtgaagcagttccttcaggcagacttccggtcactttttaccagaccacggaggaactgccggaatttacggactacagcatgaaaggcagaacgtaccgctatatggaacgcgaggcgctgtacccattcggatatggtttgagctacggcgattttgaatacagcaattttaaggcggagcagacagaagccggtcctgacgggcaggtcaggttctctgtgaaaataacaaaccgttccaaagccgaatgcgatgagatcgctgaagtgtacgttcggattgcagattcggagctggccgcaccgggtgggtccctggcagattttagacggatacatatgaaggcaggggagtctgtgacggttccgtttacccttcccgttaaagcatttatggtggtgaatgaggaaggggagtatatattggacgggagcacggcggttgtcacctgcggtgggagccagccggacagccgcagcgtcaaattgaccggaaagactcctttaacgcttgaggtaaagctggaggatttaagatggtagaacggtaccggacgatattggctgcagaggcggccgagctgaaaaaacgtcttcctgaaggaaaactggcggatatgtttgaacagtgctacttgaatacgatcgatacgacggtaaaggaactggaggatggcagtctgtttgtaatcaccggtgatattgaggccatgtggctgagagattcagcggcgcaggtgcatcactacttgccggccgcggcccgctatgaggaaatctatgacctgatcaggagggttcttcagaagcaggtctgttacattaataaagatccctatgccaatgcatttaacgccgctgccaacggccgtcactacgctccggaccggtcaggccagacggactggacctgggagaggaaatacgaagtagattctctgtgttttccgatttcgctggcgtttgaactctggaagactaccggccgcacagaacatctggaccatgccctgaaaagcgcctgcgagacggtgacagaacagtgggcggcagaacagaaccatgaggaagaatccccttaccggttcgagcgggagacggataaggagactgagacgttaagccgttccggactgggaagtccggctgcctataccggtatgacctggtcaggtttccgtcccagcgatgatgcgtgcacctacggatatctgattccctccaatatgtatgcagctgtggcgctgaaacagatgagtgagatggcggaaactgtttggcaggatcgtgggctggcggaccgggccgcgattctcggaggggagatccgggaaggaatcgagcggtatggaattacagaccacgggaaatacgggcgtgtctatgtttacgaggcagatggactgggaaatacgcttttgatggatgacgcaggaattccggggctgctgtccatgccgtattttggatactgtgacgcttccgaccctgtataccagaataccaggaggctggtactcagcagcgataatccctgtttctatgagggaaccaggctcaccggaatcggaagtccccatacaaaaccgggacacgtatggccgatgtctctcatcattcaggctcttacatcggatgatgatgcagaaattgaaaggctggtccgtatgctggtggaaaatgacgcgggtacgggatatattcatgagagtattcataaggacgatgagagaatttatacaaggccctggtttgcgtgggtcaattctctgttcagtgagatgctgatgaaaaaaattatgagataacaggcttgcctgcctggcagacggaatgaagtcttccaggcgggcaagcctgttttatgccttactgaatttcaaactctaccgttacctgggccgttacacttaactgtcccggctctacggccatggctgccgcgcctgaggccttatcctctgtggctgcgttccggtaactggaataacgtgcagtttggttgtcactatactcctgcacatggacgaccgcgcccagcgaacagccgcctgcttccgctatggcttctgccttaaccctggcggaagcgatggcattcttaagcgcctgctggtaggactcgtcatacttgctggaaaggtaggtgacctggctgatgctgttgattccggcttccacactggaagatatcagtgctcctgcctggtcaatcggaacatcggatacggtgatctccgtattcatctcatagccggtgatggttcttcccgaattccagtcgtaaaccggatcaagcccatagttggaggtctgaatcgatgtctccgcaatgccggaatcctttagaaagctgattacatttgccagatctctgctgttctgctcctgacacgcttttgcgtcttcagcctgtgtggttactgagaagaccagctcggccatgtcggggacgaccttcacctcttcactgctctgtacggtaattacatgatcttttacattttctactttgagtgtgtccggtatgggggcggaagtgctgccctgtgcgcaggccgtaaggccaaaggccgaaaccgcggccaggatcactgctgtctgaatcaggtgttttttcataatgatactcctccttagtctgtcgtacctttattttacacgaaaatccagcgtatactatttcttttctcttaacattacaggtcaaattcttgaattatctcgtcagtgtgacacagctggatgaattccctggcagacggtgttaagtatttatgtttatggtaaatgatagaaaatttgcgggaaagtgagatgccctccacctccttttccagaacaatgccgtttttgatatcatcagccaccaggagataggggagaatggagattcccagaccttccgcaaccgcttttacaatggcctgggtgctgacgctttcccaggcggcgtttaaatgaatctgaaagccggttaagaggctttccagtatctcgcgtcctccgcttcccggttctctcagaataaaattgtgctgctccagttcagacagcaaaaccgtacttctcgaagcgagaggatgggacgtgccgcagatcaggcagaggcggtcgttcatgaaggggtcccggataatttggggtgattccggaattccttcgatcagggcgaagtcgatccggttgtttaaaatggattcttcaatataagaagaattatgaaccgatgccttcacgttcatattcgggtgggcggtcgtaaacttttttataagacccggcagaagaaagtttcctatggtgatgctggaaccgatacgaagcgttcccatgtgttcccaattgcggattcccagttccatctcatcgaacagggaaacaatatggagtgcgtaatcgtaaaacatctttccctgctcagtgacgtagagccttcgggagatccggtcaaacagccggattccatagtaatcctccagttcccgaatggccaggctgacggatggctgagccagatggagctcttcggaagccctggtaattccgttgttctggtagactgaaacaaatatcttcatatggcggagcgtcatgtgaatccctccttataaggaaaatgttatatatttgatataataatactattttacttattaatcaagtggaaatatactgtaggtaagaggagggaagtacaatatgaaacgagaaaaaggaattttgtggaagctgtttctttccatgatatcgcttggaacttttacctttgggggcggctacgtgatcgtgactctgatgaaaaagaagtttgccgatgaatatcactggatcgatgaaacggaaatgctggatctgattgccattgcccagtccgcgccgggggcaatcgccgtcaacggatctattgtagtcggctataagctggcggggataccgggcatgctggtatccatactgggaacgattcttccgccgtttgtgattctgtcgctggtgtccatgttttatatcgcattccgcgataatatctgggttcactccatgctgacaggcatgcaggctggtgttgcagctgtcattattgctgtggtattggaaatgggacatggaattctggttgagaaaaacaagatttccatgctgattatggccgcggcttttgttctgacattctttctgaatatcaatgtggtatacgtggtaatcggctgtatcgtgttcggagctgccagaacctggagatcgatgaagaaggaggcggtaaaatgagctatatccagttgtttttaagttttttacagatcggtgcattcagctttggaggcggctatgcggcaatgccgctgatccagaatcaggtggtgacgctgcatcactggctgacagcaggagagtttaatgatctggttacgatctcacagatgacgcccgggccgattgccgtcaattccgcaacctttgtagggctgcgcattgccggacttccgggagcggttgtagccactgcaggctgtattctgccatcctgtattctggtgtcgattctggcatacgtttatacgaaatataaaaagcttacgatgcttcagggaattttaaatacgttaaggccggccgtagtggcaatgattgcgacggcaggcatgagtatcattattacatcgttttggggagaagcaggattttcgcttccggcccttatatccggactgaaggtggatgcggtactgatctttgcggcagcactgtttgtgcttcggcggtttgatatcaatcccatttatgttatggtcctggcgggggtatgccagaccgttattacagcagcaggaggtatggcaggatgaaaataaagattaaagaatgtgttggaaattccagaatctacggagaggatgggaaattggccggaacaatagagggctggccaaaaaacggcccggtccgtgaaatatgtgggacagacggcagcgttcactaccgtgtcagaaaagaaagaggctgctgtgtgatagaaaacagaacagaaccccaggctgaacaggaaatttcagtcccattccaatatgaggaacggacagacatcagcggaaacagcaaaggaggcggagcggcggttctgtttcgggcgcctctggctgtaaaggcggtggttccactgacggcaggagctgttatcgtactccagaaccggaaacgggagattgttctggaagattgtgaaggacgaattggaagaatcacccggatcgcttcgctgaccggtcatgaggtggaatgtgaaaaggaacttgatgcatacgaggcggcggtgctgtttgcggcagctgaatatatgtatcacgatgatgatattgagatggtatagcgccggagtgggcagcagggcgggaacaggatgcgaacagtaataatgacggcttttttattttatgactatttgacagaaagggaataatcgtttattattaaaactaagaaatgatatgaaacaattgcatggattcacaaaaatcgatcccccaaagaggtgcgactctttgggggatcttttttcctcttttgggcgggaatacccaggcaggctgccattatttattttctgtccaaccatttgcctatgtagtaacaagctacaccggccgcgacagaaataagataagaaacaatatattgcacggattcacctctttccggctggaaagagtcaacagcatatatagtataatttgtaagaattcaaaacttgacttcagatttttgtgtcatataatatgtggcatatgcataaaattataggataatattgtagtatagtgacaaaaatagaaaggaatttaaaaaaactattgcatctcttcatacactgtgctatagtgaaaccaaggttattggaaacgttaccgataccgttaccgagaaggttcccggtaacagttccaagagtaacattttaaggaaagtacctgcggcagagaacgcagatacggaaggaggatatatattatgaaacttagaaaactggcagcactttcactggcagccgcgatggcggcaggtacactggcaggatgttcttccaaaccggcggagacaaaaccggcagagaccacagcggctccggctggcgagaccaccgaagcggcaaaggcagaggacacgtctgcagcggcatctgatgcaaagggacagatttactacttaaactttaagcctgaggttgcggatgtatgggtagaactggcagagaagtacacggctgagaccggtgtaccgatgaaggttcagacagcagcggccggaacgtatgagcagaccttaaaatctgaagtagcaaagaaagaaccgccgacactgttccagattaacggaccgatcggatataagtcatgggcaaagtactgccgtgatttaaaagatacggatatctacagccatctggttgacaagagtatggcagtaaccgacggagacggtgtatatggcattccgtacgtagtagaaggctacggtattatttacaatgatgcaattatgcagaaatatttcgccctggatggcgcaaaggcagcatccatggacgatattaagaactttgatacattaaaagcagttgccgaggatatgcaggccagaaaagctgatctgggaatcgaaggcgtattcgcttccacatcctttgctcccggtgaggactggagatggcagacccatcttgcaaaccttccgatttattatgaatataaggacgataacgtaagcgataaagacgcgatcgacttcaagtattccgataatttcaaaaacatttttgacttatatttaaacaactcctgcacagatccgaagatggtaggtgccaagacggttgaggactccatggctgagttcgctctgggcaaggttgccatggttcagaacggcaactggggctggagccaggttgcaggtgtagaaggcaataccgtgaaggaagaggacgttaaattccttccgatctatacaggcgtagcaggtgaagagaagcagggcttatgtatcggtaccgagaacttcttctccatcaacagccaggccaaggaagaagatcagcaggcatctcttgacttcttaacatggctgttcagttctgacacaggaaaagattatgtgacaaacaagttaggctttatcgctccgtttgatacgttcacagcagatgagaagccaaccgacccgctggcaaaagaggttgacagatacatgagtaatacggatttatattctgtatcctggaacttcacatcattcccgagccagacatttaaagataactttggcgcttccctgttacagtatgctcagggcggaaaagaatggcaggccgttgttgacgatatgaaggccgactgggctaatgaaaaggccatgaccaaataagagtaaggcaacagacatgagatgggtgagcgtaagggaacttcctcacccatttctttacctaaacgctgagaatcactatgtatgttcaaggagggtgcaccatgcaaaaatccatcaaacggtattttccgatttttgtgctgccgacgctgattgcatttatcattgcattcctgtatccgtttatcatgggtatttatctgtcatttacggaatttaccacggtaaaggatgcgacgtgggtgggcataagcaactataaaaagatatttctggaccagaacttcataaatgcgctggtattcaccgtgaaattcaccatagtgtccgttgtgacgatcaatgtgtttggatttttgatggcgtatgctctgacgagaggcattaagggaacgaatttattccgaaccgttttctttatgccgaacttaatcggcggtatcgttctgggctatatctggcagctgctgttaaatggtattctggcaaagtttggggttacgctgtccttcgacgccaaatacggtttctggggtctggttatcctgatgaactggcagctcatcggttatatgatgatcatctatatcgcaggccttcagaacgtttctccggatttaatcgaagcggcaaagattgacggagctacgaagacacagacgctgcggcgcatcatcattccgatggttatgccttcctttacgatctgtctcttcttaaccctgaccaattcctttaagctgtttgaccagaacctggctctcaccgcaggtggacccggaagacagaccagtatgctggctctcgatatttacagtacgttctacggcagagtcggctgggaaggcgtcggtcaggcgaaggcggttgtcttctttttgatggttgcggttatttccctgacacagctgtatttaacaaggcgtaaggaggtagaaaactgatgagcgtgaaagcgaaaaaagcggaaaatcagcagatggaagtcagcaaatcgaccggcatgatgatgactgtgttctttgccatactttcactggcatttctgttccctattttcctggttctggtgaactcttttaagagcaaactctacatcagcgatgcgccgttccagctgccgaaggcgggaacctacgtggcccttacgaactatttcgaaggtgtgaggaagaccggattttttccggcgtttggaaggtctctgtttattacggtttgctccgtagcagtaattgtactgtttacctccatgacggcatggtacattaccagagtgaaatcgaaatttaacagcattctttactatatctttgtatttgccatgattgtaccgttccagatggttatgttcaccatgtccaagacggccaacgatttatacttaaactccatgtacgggctggttcttctgtacctgggatttggagcggggcaggcggtattcctgttctgcggattcgtaaaggcaataccgctggaaatcgaagaggcggccatgattgacggctgttccccgattcagacgtattttaatgtggtatttccgatgcttcggcctaccgctgttacggtagcgatcttaaatgccatgtggatctggaatgattatctgcttccgagcttgattcttccgcaggaaaagggtacaatacccatggttatccagaacttaaagggcggctacggttccattgatatgggagccatgatggccatgctggttttggcgattgtaccgatcattattttctatttaagctgtcagaaatacatcattaagggtgtagctgccggcgcagtaaaaggttaaggataaaggagacacacgatgcgggaatgtggtatgttgctaccggttgccagtctgccgtcaaagtacggaatcggagcattttctaaagaggcttatgagtttattgatacattaaaagaggcgggacagcattactggcagattctgccgttgggaccgaccagctacggggactcaccctatcagtctttttcggctttcgcaggtaatccatatttcattgatctcgacaaactggtggaagaaggtctccttacaaaagaagaatgtgactccgcggattttggaagcaatccgagagatattgattatgggaagatctattttaaccgttttccgctgcttcgcaaggcgtatgagcgctggctgaaagacggccatacagcggcggaggccagggaaaaactgtggtctgagaccgtggaatactgcttttatatggcggttaagaaccagaataaaggcaggagctggacggagtggaatgaagacatccgtcttcagaaacgggaagcgatggaacggcttcagtatgagctggcggacgaggcagggttctacgccttccttcaaatgaaatttgaagagcagtggagtgcgttaaaatcgtatgccaacgaaaaggggatccgtatcattggagatattcccatctatgtggcgctggacagtgcggatacatggtatcatccggaactgtttcagtttgatgagaaccgggaaccggttgcggtagccggctgtccgcctgacggcttttctgccacaggtcagctctgggggaatccgctgtatcagtgggaataccatgggaagaccggctatcagtggtggatgcggcgtatggaatacagcttccgcatgtatgatgtggtgcgtgtggaccatttccggggcttcgatgaatactattccataccggccggtagtgaaaacgcgattcacggaacctgggaaaaagggccgggaatcgagattttccagaaaatgcaggaaaagtttggtaaacttgatattattgcggaagatcttggatttttgacgccatctgtgttaaaattagtaaaagacacgggatttccgggaatgaaggtcctggagttcgcgttcgattccagagaggaaagcgattatctgccgcataactatacgaccaactgtgtggtttatacgggaactcatgacaataatacaatccgcggctggtatgaggagatggatgaggcggacagacagctttctatagattatatgaacaatgcacacactcccgaggacgaaattcactgggacttcgtacgccttgcactggcgagtgtggcgaagcttgcggtgataccggtacaggattacctggggctgggaggggaagcgaggattaacacaccttccactctgggggaaaactggagatggcgcatgctttccggggagatgacagatgaaatcgcggtaaagtgccgtaaaatggcgaaactttacggcagggtatgacaggggatgagtatttcttatggattctatcaatattaaggatatagccagaatctgcggggttggcgtaagcacggtatcacgtgcaataaataatcacccggatattaatccggagacaaagaatatgattatgcaggcgattaaggaacataattatattcctaataacagcgcccgcaatttaaaacgcacggattcgaaggctattgcggttttgattaagggcatcagcaatccgttcttcagcaagatgatccgtgtttttgaagaggagatccagaagaagaaatacttgtttatcatgcagcgcgtggatgcctgcgaggatgaagtggacgtggcgctggaactgattaaggagaagaagcccaggggaatcgtgtttctggggggcttcttctcacacagcaaagagaagctggaacagctgactgttccgtttgtgttaagtaccattggaatgactgattcattggaggaatcctcttcctattcctgggtttccgttgatgattacgcggagagctacaaaatgactgattatttatgtaaactcggccataagagaattctgattctggcggcgacgcaggatgatgagagtattggaaaactgcggcttgagggatataaaaaagccctggaggacaacggaattgagctcgatgaaaaactctgcattttctctgaggtaggcagggactgctataccatggattatggatttatgtccatgagccggatcctgaaggagaaaaaagtggattttacagctgtctacgcaatttcggacagcattgccataggagcctgcaaggcgattacagagtgcggcgggaaagttccggaagattattctgtggccggattcgacggacttgatatcgcacattactataatccgacgctgaccaccataagacagccggtggaggagatggcgaaaagtaccataaggatcctgtttgacgtaattggcaagaaagcggaccatcagaaacgggtgtttaaaggagaactggtggagggagaatcgaccaggagaatttgaagccagtgagaaatgggagattcgaatacatctaaattataattgacacaatagagaaaaaagggttataataaaggtacaaaaaggcagtccactccacagagtggcttccagaagataatttctaaaaaaatagtcacttacctttgggatggcggggtgactattttttttgtaccgttctttctatctatgtaaacgagaatggcaacgatcagcatcgctgcatttatgataaccataaattcttcataagtagacatataatagaaccacctcctttcggagatggaagtcacccggcagatggactgtctgattttattatatcaaaataaagtaaaaaaaacaattaaatacagtgaaaacaaaaagtaaaactaaaaaatagtgggaattatggataagtgtatgattagagctgaagtggaattttgtggtatcatatggtttgcaaaacggggacagtgaacttctatagaacactgtccccgtttttgctcacttctgactgatgtgctttttgtcaggattacccggccagccgttttcttaagagttccagatacggttcgtttacttggcagtttagaagcgcaaaggaccgcatgattctggcaatgtcaccggcggaacagtcctgaaatgctttggcgtattccggctgcaggactccggcgcagaaactggtgagaagggcgtagttcatacatttctggaaggtgccgaaggtgtagttgggggactcgctcaaaagtgacatgatgtagcgggtgaactgcccggtgacttctttgccgggacaggcgcttcgccaggccgtgaagttctctgcaccgagcagacctttcatgcgctggacctcagacacggttttcatgtattcgctctcgggatctaaagtgacccagcccatggtgccgcaatccttgtacgtccaggtggtccagtgaatccccagttcattgaaagcccggagctggtcatccatggaggccagacggtaagggatatcgtcggctcctgtgcagtattgggaaccaaattcgcctacccagagaggaacctgccaggtctcggaaaactgccagccttccgtctcctttatgtggcggatctgttgttcgtaatcccagtagcagccggcctcaacacggtcgttgtgaagcatctcatactggccgggataagcgccgggaccgaaactggagacaatatagtcgtgggaagagtataccaggttatcgtcaaagggagcctccagaccggaaaaattgtggccgtaggagtcgccttctatgaagatgatgtggcgtttgtcaatctctctgatccggtccacggctgtgtggatgacccggttgaaggtctgatagtcggaagtaaagttttcgtacatattgaagggataatcgccgctgcggcagcttgagctcggttcattgagaagctcatagccggctacggccggacagtccttgaaacgggaggcgatttcctgcatcagggcatagtagcgcctctgataacaggcatcagaccagaacagggagattccccggtcgttgtcactgtgccagtgagtgttctgccagccttgaacagcatgcatgtcaaagattacgtaaagtccatgcttttcgcagaggtccacggtttcccgcaggagacggaacccctcttctttgtagacgaagggagcgtcatcgctctcaaagtgccgataattcagtgccagacgcacgacggtagctcccgtggaagcgataaaagccaggtcctcctctgccagaaaattgtgaatcatttcctggaaaaagtaagatccgttctcttcccccagcctttttctcatgtgctcgcgaagcgagatctcggttccggggaatccgttgatgaaattctccatgttcatccagccgcccacacaggtgcctcttagccagaccggcgttccggattctgttataatattctttcctttggttttaaggaattccatacagtataactcctttctaagtgaaatgtttatctaattttactatgacagcctgcggcgcacaagatgaaaaaatataaacatatacaaaaaaataagtaataaatgcgttaaactggaaaatgtttataaaaaatcatacttatttttttggaggggatgtgctaagatgcattcataaagttcagatgacgccggcgccggcagcgggacttgtaaatgaaaaaatggaggagtttatcatgaggttaaaaaagtatttggggattttactgagcgggataatggtgctttccatgacagcctgtgctggagcggataaaggccagacggcgccgccggagagcggtcagacggaggggacaaagaaggagcagacgcaggcggaagccggaagcggcgatgttaccaagattaccatgtggtccaacgaccagcatgaccaggcggtttatgaagaaaggattaaagcgtttaatgagaccatcggaaaggaaaaaggtatttccgtggaatacaccgtctatggaagtgattactatacgacgcttgatgtcgctgtgactgccggagagggaccagatattttcaagtgtaataaaattggcaattacgcggaggccggatacatcatgccatgggaggctgaagccggattaaaggggctggtggatcgttttgcggagtataacgcgcccggttatggagaattcggccagaagacatactctatcccgatccgtgtgacgacgtatgggatcgcctgtaatatggatgtctttaaccagtacggacttaagacacctgagacatgggacgaaatgagggcgtgtgcaaaggcaatcactgagggaagcaaggagtcaacttacggatatgcgctggcaatgggatatggatcctacaactatttctatgtgaatttaccaaatgcagccagcgtgggagatgagtatttcaatcacaccacaggccggtatgactttgaatcccttggcggtttctttgaccatcttcagggatttattgatgacaagagtatgttcccgggctacgagacgatggatggggatacggcgagagctcagttttcggcaggaaatattggtatgatcggtgttatgtcttcagacgtgacgacatttaagaatcagtttccatgtgatttcgagtggaccgttattccatatccggttgctgatgggtctaaccgctataaggaaccggttggtgccgccatgtcctatgtcatcaattccagggcggcgaaggacggatattcggacaaggttgcggagtttataaattatctgtattccgatgaaatgtttgtggctacgaatgaggcacaggtggatatcagtatcttaggtgatgagattaccagccagtccaaggtggatggcctggatccaaactggattaaattctccgatatggatgtattctgtattaagtatccaaatccggatggcgatttatcgattgagggagacagctatcaggacgtttacaacaagattttgactggaattatcacggatgtggatggcgcgctgaaggacttgtcggaacgttacaataaggctctggatgaagctgttgcatccggaaaggtgaatattgatgactacattgatccgaatattgccgataagatgaagtggaaccagtagcggctgaaaaaattggcggggatatgcacggtatctgccagctcatacagagctggcaggccatgccgcaatatggcgaagagatagggtgagagtgaaggatatatgataaaaacaaagaaaaaaataaaaaaactgcattccgcaaacaagattcaggaaatcctgatgattacgcctatgacgatcggctttctcctgttttccgtctatccgattatctgggtgcttcggtggtcattttttaagtataacggatacagtgaaccggtttttgtaggactgggaaactttatcagggtgttcagccgtgatccggcatactggaattcactgaaaaatacgtttctgattgccggtatgaagatgatatttgagattccgctggctctggtcttagcagtgcttctgaataataagataaaaggcagctctttctttcgggtggtgttctttctgccctccgtgttcagtatcgcggttgtaggactgattttctctattttgtttggggcttataatggaattgtaaatgcaattctcaaaaatatcgggctgattacccagaatatcagctggttcagcgacaaggggcacgccatgtttgtgattatcctggtgtcgctgtggacgacctttggacttaatatgatttactttttgatggggcttcagaatatatccaaatcgctgtacgaatgcgcttccatcgacggggccaatgaagtgcagcagtttttttacattaccatgcctctggtagcaccgattctgcagctggttctcatgctgagcgttttgggaaccatgaaaatgacggatttgatcctggtactgacgaacggagcaccgggaggttccacggaagtggtgatgacgtacatattcaagtatttcttctcgtatggtgaaagtgccgccatggaagttcagtttggctacgcttcctccatggctgttgtcacagcggtgattctgggaattgtcacactgatttatttaaaggtatcgaagaaaatgcaggaagtagaagaataggaggcactatgagaacagtcagtaagagtatctggaaggcagtgatctacgcgtttctcctggtgattgccgtatttgcactgtttccggttatttacattttactcggctcctttaagtccaataaggagattttagttgggggactgagcattcttccgacagaatggcactttgaaaattatatccaggcctggaagctggcggatttcggcaggctgacctttaacagtattttctatgcggttgtagtggtgggcggctgtgttgtgacgtcgattacggccggctatgtctttgccagagggacgacccggttttccaaagtggtgaatgccatggtgctctgctctatgtttgtatcgatcggaacgctgtcgctctatccgcagctcagtctggccaaagtgttcgggctcagcggaacgctgtggggaccgatcatcatccgtgtgtttggcatgaatgcgacgcaggtgtttatcgctaccggctttgtccggcagatatccagggagattgacgaggccgcacagatcgacggctgcagcttctttaagatattctggagaatcatttttcctctttgtaagccgctggtggcaacgaccggactggtagcatttcggacggcctggagcgattaccttctgccctacgtatttaccattgcggcaaaggacaaatggccgctggtagtcggagttgtcagcctgaaatccagcggtgaggcggtgtcctcctggaacctgatgctggcgggaatcagtatttccattttaccgatgcttattgtatacttattcttaaacaagtattttatttcgggtctgacggaagggtctgtaaaaggttaatagactttcgagacgaatggggagtgggggaagcgtatgttttatacaattggtttactggtcgcattttctgtaatactgcttatttttgaccataagagcagatattcttatctgtttgttctaatggcaacaggggcgacgctggccttcttctccatcattctgcatatcaatatgtttgccagctacggggattactatggaggaagcatttattaccggctggattatatgatctataaagcaataacggccagactggcacttcccattgtcgtgaatatccggcttatgaatgtaggggtcgcactgtttcttttggccgaaatgatttttaactacgagtttcagaaaaacctggggaggagcgagccgaaaatggaaaaggggagccggaggatgcggcgcctgctgttctttgcggttccccttctttccataattctttacgatcctgtaacctctacaaaaatgtatattttgtatcataccagcgggaataaaccgttcgtgtatggtctgtactgctctttaaatgtgatctttaaacttgtagtcctgttgctgttgcttcggccgatctgcgttttgatccgctacgtgatggtgacatccgtccgctttcttcgcaaacgaatattcctgttttccatgggactgatgcttgctgccgcgatcttctatatttttttctatatcgggccattcagcatgtcggtggacaaggtgattcgcagcggtttctggatctttgaaaacgttcaggcgcggattcagaaggtttatttgacggctccgtcgctggtgctggtggtgatctcgttctgcatgtttatactgctgagttttcggatggatatgtcggcaacaccgtttgtgaagcggaagattcagaagaatttaaacatcatgaacgaagtcctgggggaaacgctccattcccagaaaaatctctttttttctcagcagatactgatcacaaagattgaaaataaggtggataacacggcggagataccggaaatcggccgcatgcgaaagctgatagacgagtcgctggggcggacgactcaaatgcttgatgagttaaaagaaattaagtatcactatctaaataacagtgtttccagcattatcgatgaagcgctgaatgaagttacagtgccttcttatatcacggtggagtggaatggagaggggtatgaggatatctgcgggatgtacgaccgctatcatctgtgcaaggcgctggtaaatatcttgaacaattccgtggaagccatcgaacagtccgggaaggaagaggggaaaattacagtcaggctggaatttttgttccgatggctgatcatcatgatccaggataacggaaaaggtattcgtttccgtgaccgcggccggatcttttcgccgcattattccggaaaacaggggaagatgaactgggggctgggccttccctatgtttataaggtgatcagggcgcatttgggacagatcaagatcgacagcagatacggggtatatacgtcagtatttcttctcctgcccatgagcagggaagagaagaccagtgtctcgcagcgtaacgggggaggaaggaaacatggagaaaatcaaactggtcattgcggatgacatggaggaaatcaggatccatctggcggaggagattgctgcacggtcggatgatattctggtggtggggcaggcggctacgggccatgaagcatttctgatggtggaacagctgcttccgtctgtcgtgcttatggacattcaaatggagaccagaacctccggaattacagcgattggtaaaatccatgagagatatccgggggtgaaatgtatcgcacttaccatccatgaggatgaggaattcatatttcaggcatatctggccggagcagttgattatatcataaagaccagttccattgagaagattgtgggggcgattcatgatgtgatcgataataagcttctggtccgcccggaggtggcgaaaaaactgattgacgggtatcagagagtctatgagaagcagagccggttaaaagagacctttcaggtgatgcttctgattaatacaacggaatatgagatattaaaaatggtatatgaaggctatacgtataaggacattgcgtcaaaacgctttgtggaggaaactacgatccggtcgcagatcaaccatattttaaagaaattcaagaagaagcgtatgaaggatgtggtggctctgttaagggaactgaatatttttgatgaatcataatgacagatagaaatggagaaagacagcgatggaatataatatatttggaagaacaggtatgaaggtatcagatattggctttggagcatgggcaatcggcggcagaggctggggcgacggaatctgcgacagggatgcagtggaagctttaactgtttcgtgggaaaagggagtaaatttatacgatacgtgtgatgcctacggtgatgggcacagtgaggaactgatcggagagttcctaaagggacgcagaaaggaagctgttatcgtgacgaaaggcggtacaaacttccgtctgccggaacgaagcaagaatttttccaaagagtatctcatgatgtgtctggaggaaagtctgaaacggcttcagacagactatgtggatgtttaccttctgcatgttccggatgcgaagctgcaggatgaatgtggggtttttgagacactgaaggagatgaagcagtctggccgtgtacggtttgctggtcttgccatgtggggagccggagacaccatgcacgcgctggaacgtgatacggaacgggtaatcgatgtgctggaatgtccgtttaatattctgaataaatccaatttagaggttgtgaagctggcgaaggagcgtaatattgcggtgatgaccagtcagcctctggccagcggaattctgaccggaaagtaccgggaaggaacacagtttgccgaaggagataaccgaaagggattctggacagcgaaacgtttcgaggaggtaaaaccggatctggaaattgtggaagcgtgtacggcagagacagggctctctatggggcatctggcgctggcctataatatgacgtatcctggtatcagctgtgtgatcccgggagcaaaaaatgcagcccaggctctcgacaacgccgcggccacagggctccggctgaatgatgacattatggagcgtctcagcagtacaaaaggctttgttttctagtgtcaatacactggcagcagtgagcgttgaaggcagcaggctaaaagggagactggtatgaagaaaatggtattacgggaaggctggcttttgaagcgttttcccacgggaatggactacagtccggaagagttggaagctggttttagagtgccgggaaccggaaaggaccgcagttttccggtcctgaattttccggaacaggtccacgatgtacttctggattacggagtgctaggtaatcccaatgagacagggattaaccgtgatttatggattgatgagtatgactgggtataccgccttgaatttaccggtgatgcgtctgcagctgcaggcggtcaggtttaccttactttagaaggggtagatacgtttgcagctgtttatttgaatggaaccttagtcgggaaatgcggcgatgtgtttctggattaccggttcccggtaaatgaggtaaatccgggagcgaacgtgctgctgatctggattcaatccgcagcgaaaaaagtaagcgggataaggcttccggagcggtatgagggacgtgtcccggcaatctctgcggtgcgggcgttccgctccggctttcatgagtactgcggtccggttccaggcctgatcaggtgcggaatctatggtgacgtgactctgatgcaggaagatccccttctgtttgatgaagtgacagcggacagcagtctttcggaagatggtgactgcggcgtggttacgattactgcctcttttctgggggctttggaggaatatcagggcgaaccgctgcaggccagggtttttgacagcaccggccaggtgagggcggaggaagtacggcagattatgagccgttctgaaaccatggttcttcgtgtgccgcatcctaaactttggtggccgcggacgatgggggagccgtcagtatacagactggagcttacctgcggcagcagaacagcggattttttggaaaaggtgataggattccgcagagtttccatggctggagatatggattttcggatcaatggaagacctctcaagctgtggggggccaatctcgtccatcccgatactctgagcaaccggtaccggccggatgtgatgggacgcctgctggatcttgcagaactggggaattttaatattctgcgggtctggggggagagcgaacgctatccagaggcgttttacgaggaatgtgacagacgggggattcttatctggcaggatttctatctctgttatactgcttatccagaggaagcggagttcctggaactctgccgcaaagaggcggagcagatgacgaaacggctgaaatcccatccgtccatacttctctggtgcggcggaaatgagactctgttatcaagggattatgaaaatcccggaggcccctgttttggtgaaacgattgtccggcaggtgtttcccggggtctgcatggaacaggatccggaacggtactaccatccgtcttccccatgcggcggtgcatatgccaatgatcccctggcgggagatacccacggctatacccatctctggttcgttccaggaagggaattccctgtatttttaagtgagaactgccgggtctccacaccttccatgaagtccatgaggaagatgatgagaccggaggagctctggccgccggaatatacggggagggttagccggagacaaagaaaagagtggccggagacatgggaacttcataatacaaaccagggcgtcataaagcttggacctgtagagcattattacgatgcaggatcggcagatgaactggtctaccggatcggtgccgctcatgcggagtatattcatgaacaggtatgccggtttcggagaggcttccggggagaagaagccgcttctgccggtacggccagaaggacgaagggccatatgctctggaagtttaataataacagcaatattatttcatatggagttgtggactattatcaggagccgtactacccctattacgaattaaaacgctgctacgcgccgtttctggtgtcgtgcgagctgggggaccatggttatctatgggtgacgaatgatacggggcatgccgtaaacgggcatctggaaatattcctgtttgatatcttaaagaatgaacggcagggcacttttttccagaagtttcatgctgaaccggatgaatcaaaaccagtctgtaccatcgactgctacggtcagttcagaaaaagtaacctggtctgcgctgttgcatattccgatgaaggcgaggtcatgggaatgtgcgctgaaccgtgcgagattgagcgaagaatggagtacccggaacatacggggcttcagctcaagcaggagggggatatccttgttgtcactgcgagccggtttgcaagatgtgtggaactgggaggagacgaggatggagatgaatttggctggctgtttgaagataattactttgatttgctgccgggaatggaaaagagaatccgggttctggggcgccatgagaggggaacggtgacggcgaaggccgtatatgatgaggataaggcggtgctgaaatatgaaaagagagattgaagagtacaggaagacgccggttcagtatgaatgcgatgtagtcgtgtgcggaggagggacggcgggctttacagcggcgctggcctctgccagaaacggcgcggataccatactggtggaacggtttggccatgtggggggaactcttgtaaatggagcaggcccgctgcacagcttttttaacctgtataaggcctttgcgggggcggaaaagactcaggtagtcagaggaatcccgcaggaaatcgtgacgcgtatgatggaagcgtctggatcgccgggccatttagaacaggataagggtggaaactatgattcagccattacgctgatcgactgggagatttttaaggatgttgcatttaccatgctggaagaggcgggggtgagaatcctgcttcatacagtaatcgcggatgtgataaaagacggcgagcgggtatcgggtgtcatcattgaaggaaaatccggaagagaagccattcttgcccacacagtaattgattctaccggtgatgctgatgcagcggcgctggccggtgccggagttgtaaaaaaacacgatacgacttcggcagggatgccgtttggcatgacaaatgtggatatgcctcggctggtggaattctgccgggaaaaaggcattgtcaatcagttgatagagggcgataaaggaagcagtaccgaccatgtaatacggctcggttttgaactgaaaaaaattcctgaatttacagagtttatggaaaagacgggaatgtggggacctcttggtttttctctgcatgagagagaatttacttatattaattcggcggctctgcctgacgtggacgccgccagtacagaagagtattcaaaagcagagatcacactgcgccatcaggttatgaaactggcggggatgctgaaacagtatattccgggatttgaagatgcttatgtgagctggacaccggccagtatcggcgtgaggcttacgagaattgtggaatgcgagtatgatctgtcgctggaggagattgtatccggaaaacggtttgaggatgaagtgtatttatacggattccatgactgtgcaccgagaattaccatccgggaaggcggctattatggcgttccttaccgggcgttgattcccaaacgcgtggagggactgctggtggccggaagatgtattaccggcacatgggaggcgcatatgtccacaagaaacacggtatcctgcatggcccagggacaggcggcaggaaccgcggccgcgctgtgcgttaaggagaatatccttccaagatatctcaatacggaagaactccggaaggtgctgcgagagcagggggtatatttaggctgactgatcagaaggaaggagagaaggcgtttcccgaaaaccttgtctttgtaaagaaactgttatccccataggaatttcctatataatacaataaaaaaactatatttccttataccgctgccctgtgctatgattatggtcataaaatcagagccgtgaaaagatgagagggccagcttccctttgcatatggataaagcggcagggagacagaaaaatgaagacaacggatttgttcgcaaagaaaccggtactctccttcgaggtttttcctccaaagagaaccaatccggttgagacgatttatgaaacactggacagtttaagaaaactgaatccggattttatcagcgttacatacggagccggaggcagtgaaaactgtaaggcaacaacggagattgcctcaaagatcaagaatgaatatggtatcgagagcgtggcccatttgccgtgcatcggcctgacgaaagacgatgtaatcagtctgttgggtggatttaagagagcgggaatcgataacatactcgcgctgcgcggggatatccccgaaggcggacgcccggccggtgattttgagcatgccagtgacttaatctcttttataaaagaaaaagaggagtttaaagattttaatgtggtggcggcctgctatccggaaggccatacagaatcggaaaacatcctgacagacatccgaagcttaaagaccaaggtggacgccggagccgaccatttgattacgcagcttttctttgacaatgactgtttctaccggtttaaagaacgcgcattgctggcgggaattcatgtcccggtggaagcggggatcatgccggtcaccaataaaaaacagatcgagcggatggtgtccctctgcggcgtaagcctgccttccaaatttaccgcaatgatggaacggtatgagcataatcccgaggccatgcgtgacgccggtatcgcctatgcggtggatcagatcgtggatttgattgcgcggggtgtcgacggcattcacctttatactatgaataatccctacgttgcttccaaaatccacgaggctgtataccgcctgctggccgcgtgagaaccctcaccggccggattacgtcagtatgacgaagccctctgccgcgatcacatttttcagctctctgatataggaaagagaaatcgggcttaaagggaatttatcgctgcaaatatagccgatccgcatccattcctctgtcttaagcggtaccgacacgatgttgtcgccgtttaggttgctgtttaatattccgctgcagatcgtgtagccgtttaaaccgatcagcaggttaaacagagtcgcccggtcgctgacatgaatggttttcttatgcggggccgtgcttaagatttcctctgaaaagtaaaaggaattgaaggttccctgttcaaatgccagaaacgggtagtcttccagatcttcaagcgtgacctccttccttccggtaagcggatgcatggaactgataaacacatggggggccgcctcaaacagagggataaagagcagatgattttccttcagcagtttcttcaacaccttttcattaaactggctgaagtagagaatccctacttcacttcggaaattagccacatcttcaataatctcatacgttctcgtctctctcaacgtaaactcatactcatccgtatcgattcgggagatcaggctgacgaaggcattgactgcaaaggcatagtgctgtgtggatacggaacagagccgcttggccggcttcccgtttgtatagcgctgctctaaaagctgtgtctgctcgataatctggcgtgcatacgacaaaaattccgtgccgtcggccgttaaggatattccctttgctgtccggtagaacaactcaattccaaattccgattccagttcttttaatgcggcggaaaggctgggctgcgagataaacaactgccttgctgcctccgtaatagacccgcattccacgatttttatgatgtatttcagctgctgaatcgtcataggacacctcccatagtttttttctataatatactgtatttttttgaaaaacgcaaataagtacgtaattatgagcctttcaggcgatttttcgccctatcaaaatcagcagattggacgaaccgtcctgattttctgaaaaatacggatctggaaaaaattaccatttttggaaattaccaaaatatggtatgatggttccaggtttttaaattcaggaggagaaaaattgagaggcttacgatgggattatgacttgcaggagagaatttatcaatttatcgtgtactttgtttctgaaaatctgtattctcccaccatccgcgagatttgcgacggtgtgggaaaaaattcaacggctacggtcagcctttatctggaggaactggaggatatcgggagaattattctcggccatggaccgcggacgattaagctggtaggatttaaggtcgtggaagagtgtcagcattaaaactgtatgagatccaagggggggatcgagtaaaaaccgggagagtgtttcatctgaattgatcagttgaaaacgctctcccggttttttatatcataggaaagtacccctatgatataaaaaagccctccgggcaggatcgcactgcggcggtaaggaatcatgtcgctaatgcgacccgccgcaggcggagaatcccgcttgcgggattcattcttgtactggattgatccaattattctgcagattccagaccggtctggtcttccttgctttcaccggaagcggcatcgctgtcctgagctgcttcctgactggctaaagcggccgcttcctccgggtttaaattctccccctttggtgtaatcgttacacgggcttcgttgccgacctggtcctttacgcagatggtcagattctccttctgcatgtcgaaggtaatgattcctgtgctgcggtcaatggagagaggaaggatctccggagtgtcatcatcgtaagcatatatggtgtcatagtttactccggactgggtatcctccaaacggaaggaaaggacgccatcctcgatgatggaatctttaatgtccggcggggtgtcatccagaatattgacctgttctgaaaatacatttttcataccgttaaaggctgttaagctcacctttacggttccattggagccgagtacagccgtgtaggtcttggaagcagttttggtgagctccacttcgttgccgtccagggttactgtcatggctttgatgggaaaaagtgattttatctttaattccatggtggttgtcgtaaaattatcggcttccccgattgtcaaatccccctttggtgctgcagtaaccagaataaaaataatagagttgacaacgatgaatggaagcacataaaacaggaggaccgtcataaagtcactccgtccggaatcgtgccggctggagcctcctctccctcggttctgcctggaattattggtatatgggctcatattgattaaggttcctcctcatgttttttacgtttcctagcataacagaaaaatgcgtttcttacaagatgatctgttaaatcgtaataaattgtggtaatatattaagaaagagcttaaaaggagatgccatatggttgacgaggccgtagcatttgcgatgaaggcccatgaggggaccttcaggaaagggactaaagttccctatatcgtccatccgctggagacggcagtgattgtttccatgatgtcggaggatgaagaactggtttgtgcggcgcttctccatgatgtcgtggaggatgcgggagtatcggagcagcagctggagacgttatttggccagcgggttacggcatttgtgatggaagagacggaggataagacaaagtcgtggaaagagcgcaaagcggcgacgcttaagcatctggagacggcgtcaagggagagcaagatcctggttctgggggacaagctgagtaatctccggtgcacggccagagatcatatggtaatcggagaagcaatctgggacaggttcaatgagaagagaaggtcggaacatgcctggtattataacggtgtggcggaacggatcagggaactgtcagaatatccggcatgccaggagtattttgggctgtgcaggaaggtgtttggggattcgtgagtaatcattgggctgtctgtcctgttacggggctgccgcactgtgggtcaaatgacctgggtgcggcagccccgtgatgttgtttccctgtttttaccgttataatgtatttgcccggtctgcaacatttttattaaagttgattacctgatgttcataggttgtgctcatcagcggagacgtgatgataaagtctgcagtcgctctcgtattggcgatgggaatatcgtaaacctgtgcaatacgaagcagtgccttcacatcgggatcgtggggctgagcggtcagcggatcagaaaagaagataaccaggtcgattcttccttctacaatctttgcgccgatctgctgatcaccgcctaaaggaccgctattgtagccctttacggacaggcctgtctgatccgtgatcatacgcgcggtggtgccggttccgcacagcgtgtgctggcttaagatgtctttatgttctttgcaccagtcgatgagagcgtgcttttcattgtcatgggcgatgagagcaatatttttctgtttctccagtgtcagtgtgataaaatcttcctgtatcataaaattcctcctttaaaattgtggcttttgatcttttgtctgtttttctttcagtttcatgatctcttccatcataaatgattttcaggtaattggatagtggaaaatggtaaaatctttctaaaaaacaaattgtaatggtgcgacaggtattgtaggaaagatttaaggaatttaaatgccatccgcccggaatctatgctatacttatagcagacagatgcttgcggaggtgggaaatatgaagagtattaaatggaagattctgagacgaatcggggcttttgtgctggctgccgcactggtggcaggcggacagcccttctgctcctgcgctgatgaggcagcggcagaggaagagatcggtccgggaattattccgaaagtgaagcctgaggatttgacgccgctggtggtgagttacagcacctatcaggacagtgtgggctggagcgaggtcaaggccgacaacgatcccttaaaggttcagacaggcagttttgccagtgccatccgcatgacggtttccggacaaccggaggtcttaaagggaactctggcctatcaggtgaatattacaggtaagggctggcttgactggggagagaatgatgtggagatcggagcggctccggaacagcttccaattgaggccgtagccatgaaatttacggacaggctggcagagtattacgatatctattattccgtttgggaaaatggtgcatggacggaatgggccatgaacggaacggcggcgggagcggagggctccggcatccgggtggaaggcttaagagccgcggctgtgttaaagggggctgagccgccggagatgaaaccggaggaaattgatccgacaaagcccatggtggctcttacctttgacgacgggccgagcacgcctgtgaccacgaggattttagacagcctggaggcaaacggcgggcgcgccaccttttttatggtgggaaaccgggtccctggaactcaggcggtggttcagcgcatgaatgcactgggatgtgaggtggcaaaccatacatacgaacacaaatatctgaccaaggcaggagatgcaggaatccgctcccaggtagggctgactaaccagaaaatcactgaggcatgcggagtgacaccgacattagtaaggccgccgggaggtttttataatcaggcgtccctggataccctgggttccatggggatggctgctgttatgtgggatattgacactctggactggaagacaagaaatgcacagaatacgatcaatgttgttctgaaccaggtaaaggatggggatattgtgctgatgcatgatatctacagcacgtcggcggacgccgcggaggtgataattccggaactggtgaacaggggatatcagctggtaacggtcagcgagatggcccagtaccggggcggaattcaggccggacacgtatataaccgtttccggccctgaggattttcctgtaatcttaacttggtataatactttgaagtgaatatgtaatggataagtcttttctggaatacgcttttttgaaattctggattatccgctttaataccatctctccgttttcataggtggctgtcggaagcagcatgaggtactggctgacgctgtaccggctgtagatgtcgccccggcggagagaggtgcggatggactcacccagttcatccatggccctcgtctgtacggagggctttaataattcgccctttaagttgctgatggtgatcaggcataaaaagatggaatcaccggtacgttcgatggcgcgtgtctccagctggtaaacatcacggaatacggaaggctcacagcagaatgcgcccttttctttggctccttccatcaacgtctcctggatcgtgcttagatccatggtgatgccgtgctttttgtcgctgatcagtttatagagctctttaaaccgcgtggatggagtgatggcgaactcattgtagaacatgtcattgacgtgctgataatgttccatagccatatactgattgccgctctggtaaagagcgtagatcagatagtaatgggcatcctcttcatactggtcgatggcgatggcctgctggcagacatcgatgatcgtgggataatccttctgctcgtcaagcagcagcagcgtccggtgaatcagattctgatagagggtatggtaataggtatggatcggtacgacccaggattcccattcggatttcggaagaaaattacccttataaagggataccgcttctaaacagagggagaggcattcctcactgttgatatcagttgactcggaacgaagacacagatcctcaaaccggtccgtgtcggtgatggtggtcagttcttttgtccagccgtaggctttccggttttgcgtgattaagtcctgaggtggaattcccaatggctctaaaagcttccggacacggaacatcagggtcttcaaagcgccggccgggttattgcttgcctcgtccttccaaaacagatcgatcagctcctcaaccggaatgttgcggtcgcggaacgtaattaagtactccagcagactccagggctttttggactggttgtttcggtccatgatcacctggctgccgatcgttatggaaaattctccgagcatatttacatatataatattattcttgttattcatgagcatctcacactcccattttctaatattagtataaagaataaaaggaaaaatgtccagtactgcttgtgaaacatttcaaatatgaagaaagacgtatggagtgaggctgctgcgaatcattcccagccgggactgacgccgcggatgcggacggaaaaaagattgagatttcaccggaaatcatttatactgtaggaaaaatacatcatatcaagggagagtggctggatgaagaaaaaacgtattgcgtcgatccttctgctgctggccgtggtgctggcagcggcagcaggaataaaaacttatgtggattaccaggttcgggcagcggcagagcgggaatatgagagtcttgctgaactggcccgccagacggaagcgccggttgagacagagacgccgatcgagtcagaaccggaagagacggaggctccctacgtgtccccgatccagtttgatgagcttaaggagatcaatccggacatcgttggctggctgaaggtcgaggggacagagattgactatcccatcgttcagaccggaaataatgaaacttacttaaatacagacttcgaaggtaaaaaaagtgtggcgggtgccatttatcttgattatgagagcgaacctgatttttccggccggcataatataatctatgggcataacatgaagaatggcagtatgttcaaagacattgtaaaatataaggatgaggaatatttcatggagcaccaggatatcaccgtctacacgccggaacgcgagtaccatttacgccccatgtcggttctctatacggaacctaccggtatgagaagaaagacgaagtttgccaccgaggagagtttccaggcgtatgtggaagagatgacgaagggatgttccttcgcccagatcccggagaagccgttggagcagctctggtcctttatcacatgcagttatgaatttaacgatgccaggaccattctctatgcctatgaggtaacggaggaatagcacattaagagaaatttaattgaaaaatgaaatcatgtgtgctatagtacattctgattctggaaaaccagtaacagtaagctggctggaacattagtactgtattgaaaagaggagaaaaagtatgggcaagtattttggaactgacggtttccgcggagaagccaacgtaacgctgacagtagaagatgcttttaaagtaggccggtttctgggctggtactacgggcagaggaaaaaaggcgatgtatgccgtatcgtcatcggaaaagatacgagaagaagcagctacatgttcgaatattccctggtggcgggattaaccgcgtccggagcggatgcctatctgcttcatgtgacgacaacccccagcgtgtcatacgttgtccgcacagaggatttcgactgcggtatcatgatctcagccagccataatcctttttatgacaatggaatcaaggtaatcaatggaaacggagagaagctggaggagagtgtaatcgttgagattgaaaagtatctggacggtgagactcacgaggtacctctggcaaagcgggataagattggaagaaccgtagattttgccgccggcagaaaccgttatatcggatacctgatctcaattgcaacccgttcctttaaaaataaaaaagtggcgttagactgtgcaaacggcagtgcttccgccattgccaaaaatgtgtttgatgctcttggcgcggagactcatgtaatcagcaacagtcctgacggcttaaatatcaatacaaaatgcggatctacccatattgagatgctgcaggaatatgtgaaggagattggagccgatgtgggatttgcctacgacggcgatgcagaccgctgtattgcggtggatgagaacggcaatgtcgttgacggcgatgtgatcatgtttatctgcggcaaatacatgaaagagcagggggcgttaaagaataacaaggtggttaccaccatcatgtccaatttcggtttgtataaggcgctggaccgcgagggaatcggctacgaaaagacggcggtcggcgataagtatgtttatgagaacatggtgacttatggaaactgtctcggcggcgagcagtccggccatatcatattcagcaagcatgccaccactggcgatggtattttaacttccctcaaggtgatggaagtgatgctggagaagaaggagagtcttgcgaagctggcttccgagattgagatttatccgcaggtacttaaaaatgtccgtgtaaaagataaggcggcggctcaggatgacgccgtggtgaaggcagaggtttccagagtgacggaagatctcggtgacagcggaagaatcctgcttcgccagtccggtacggaaccggtggtccgcgttatggttgaggcggctgatttggaaacgtgtgagaagtacgtggatcaggtaatcgaagtgatgaagcagcaggggcatgttctgtaagggaatgtgaccggtggaacagtgccgatgaggcctgcgctcagggggagaggaagataacatcagttcctttccacttgggcgcgggcttttttgtttttccgggaaccgggctgattttaaattgtaaacgtgctggattcatgatatgataggtagtgctatgaaggatgcgaatgttgaatgaattatgaagaaaggccattgtttatggatcataaagacttttcaaatttaggggatcagatcagggattccgtgcaggatgccatagattccatggattttaaacaattaaacagaacgatttcagatacggtgaattttgcgctcgatgaggccaggaaccagatgatgaaagggatggatgcggccagaagaatggactccgggaacgccggatggaaaggccccgataccggcgccggtgataaaaccgacgatgcgcgaaacacatttcagacagaggcaggcgcaggaagacggccaggggcagcgaatgacagcggcagtaccggagagagagggcggacaggctgtgagaaccgccggtacacgacggagaacgccagccgccggacagaccggccgggataccgcgcctttcagaccagcgagacggcgggagaaaacggaaccgcgtaccgtgtcaggaagatggctcccagcccggctgccataagaatgaatcagccggggcgtatttcgggaattctgtttaccgtgtttggcgggattgggcttggtgtagtcggaatcctgtttctggtcacatggattcttgcgcttgtggtaaaaccgctgtggggggctgtgctgggatcgtctgggcttcttctggtgctgggctgcgtgttcgggaccatgctggggaccggcatctccacaagaggccggttaaaacgggccgggctctacttaaagcaggccggcagcaggctatactgtgatatcgaggagctggcgcgcagcattggaaagacgagaagatacgttgtccgggatttacagaagatgatcgaaaaggggattctgccggaagcccatatcgacgaacagaagacctgtctgatgttgaatgaggagacgtataagcagtatttaagtgctcagaagtccttaaaacagagagagaaggagatggcccttttagctgaagcggaaaagaaacagaagaagggtgcatcggctccggaagaaaggaaaaaggcggaagaggatgagaaacagcttccggaaggcctgaaagagatgatggctcagggcggggagtatttaaggattctgcgggaagccaacgatgcgataccgggagaggcgatttccgggaaaatctccaggctggagactgtcatcagaagaatttttgagacggtggagcgtcagccggaccagatggaggagatggagcgttttatggactattatcttcccacaacggtaaaactggtaacagcgtaccgcgatttcgacagaattgagatagagggcgataatattgtctcagcgaagcatgagatagaagaaacgctggatacgatcaatctggcattcgaacgtcttctggatgatttatatcaggatgctgccatcgacattaccactgatgcgtccgtgcttcagacgatgctgaaaaaagatggattcgcggaaagcgattttagtaaaagcgacttaacaggagggaagaatcatgagtaaagacatcgagacgatgataaatgaggcaccagtgctgaccctggacccgttcagcactacggaactgccggtggagggcgcccatgcagtgcctgcagaggtggaggaagaaaacttagcagaatccatacccgaagcggagctgacgccggaggagcgaaagatgattgatgatttcgctgcaaggattgatctgacggattccaacctcgtccttcagtatggagcaggggctcagaaaaagatcgctgatttctctgaggcggcgctggataacgttaagacaaaggatttaggtgaaatcggagagatgttaagcagcgtggtaactgaacttagaagcttcgaagcggaagaggaagacaagggatttttcggcttctttaagaagagttcaaacaagctggagagcatgaaagccaagtacaataaggctgaggtgaatgtgaaccagatctgcaagattctggagaatcatcagattcagcttttaaaggatattgccctgctggacaagatgtacgatttaaataccacttactttaaggaactgagcatgtatattctggcaggcaagaagaagctgaatgaggtgagaggaaccatgctcccggcccttatggacaaggctcacaagaccggccttccggaggatgcacaggcagttaatgatatggcttcgctctgcaaccggtttgagaagaagatccacgatctggaactgacccgtatgatttccattcagatggctccccagattcgtctggtacagaataatgatactctgatgtcggaaaagattcagtcgaccatcgtcaacacgattccactctggaaaagtcagatggtactggccatcggaattaaccattccgagcaggctgccagggctcagcgggaagtcaccgacatgacgaacgaacttttaagaaagaatgcagaggtcttaaagacggctaccattgagacggctaaggaatcagaacggggtatcgtggatatggagacccttaagattaccaatgaatccctgatcaccactctggacgaggtagtccggattcagacggaaggacgtcagaagagaagagaggcggagacagagctggcccgtatggagggcgagttaaagcagaagcttctgcagctgagcaattaaacttaacgaagatttttgttgtaactcaattctgaacgtgctataataatataacactttacctcggcaaattccggggaggtgattcttatagtaaaggaatgatgaagatggggttagacctgtaaaaaccacgttgttcattgtcaagaagtatagcgtgatttatcgactccaaagccctggatgaagataaaagggaatgaatcgaataaaatttaaaatttggaggagaaagacatgttaaactatcagagatataagcgggtaccagtaatcaattatccggagagacaatggccgaacaaagagattgaaaaagcgccggtatggtgcagtgttgacttaagagatggaaaccaggcgctcattgagcccatggtcgtggaagagaagattgagatgttcaaccttcttgtgaagcttggctttaaggagatcgagatcggatttccggctgcttcccagattgaatttgatttcttaagacaactcgtagaaaggaaactgattcctgatgatgtggtagttcaggttctggttcagtgccgtgagcatctgattaagagaacatttgaggctattcagggaattaagaaggcgattgtacatatttataactccacctccactctgcagagggatgtggtatttcacaagagcaaagaggaaatcaaggaaattgccatagaaggcaccgagatggtaaagaagtacatggatgggttcgacggagaggttatcctcgaatattcaccggaaagctttaccggaacagaacttgatttcgcacttgatatctgtacggcagtacaggatacatggggagcgactcctgagaagaagatcattattaatcttccttctacggtagagatgacgacccccaacgtttacgcagatcagatcgagtggatggaccgtcactttaagaaccgtgacagcatcattttaagtgttcatccccataacgaccgcggcaccggcattgcggctacagagcttgcgcttcttgcaggcgctgacagagtggagggaactctgctcggcaacggcgagcgtaccggcaacgtggatattttgaccgtagcatataatatgttctcccagggaatcaatcctgagttaaatctggagaatgtccgcgagatcgtggatgtatgcgagcggtgtaccaagatggaggtcgaaccgagacacccatacgcaggaaagcttgtctttaccgcgttctccggttcccatcaggatgccatcaacaagggcatgcaggccatgcacgagagaaatcaggagtactgggaggttccgtaccttccgatcgacccggcggatatcggcagacagtacgagccaatcgtgcgcatcaacagccagtccggcaagggcggtgtggcctttgttatggataccttctatggtttcaggcttccgaagggcatgcacaaggaatttgccgatgtcattcaggcgatttccgagaagcagggtgaggttgcgcctgagcagatcatggatgaattcaagaagaactacagcgaacgcaaggaaccgatccatttcagaaagtgccagattacagaggctgaggatgatacagagttctcaacgctggcgaaggtccgttataccgatcacggtgtggagaaggtctttgaaggagttggtaacggtcctatcgatgcggttcagaagggacttgaaaaagcactgggaatcgaaattcgagttctggattacaatgagcatgcacttacttccggttccggagcgcaggcggcatcttatatccatctgctggatgtgaagacgggacgcgcaacgtacggcgtaggcatcagttccaatattacgagagcttccatcagggggatcttcagtgcggtgaacagactgttctattaacgaaactgcatgggtgaggctgtcctactgatgtaagatagtgtttattgtctgatatataaatggttgagggggtcgcaaaatcatcaaatagatgattgagcggcgccctcgctctgtatgttttgatacggttcggactttggaatccatgaccgcccggtgccatcggtattcaaaaatagggaagaagaactggaaggctatctcgtctcataccggcaggaattccaaatcccgctgcaggcccaataaaaggggccagggcgccacatgatgttatgtggcagccctggccggtaattgggtttgctgatctatagcggatagatgttcagccgtttgattttgccgttctcatcggtctcggataagaaggcggtaaccggtatgacatgatcgttataggtgataaaataccatactgtattatccccaacgtattttacgctgtgaatcggaaatgggccgccattgaatccaaatttatgatgaaacatcatttctacagccatctttccttccaggtgaatggtatccataccggccttgatgacggaagagtcgtgaagcacaccgtactcgttaaataagtcggcaagtgccacctcatccccctttttcatgcattctatgtattgttctaatatcgtcattgctttattcctccttgttatgagcacctggcgggaattttctggccgcctgcgtgcaatccgtgtcacttcccactcagcgcagcttttcttaagctggagcattttaaatgggaattttttaactggccgggactgtaaaccctggcgaagcggctcttaaatctgctcggagcgaagcagtgcgtcaataccgccgtccacgaacagaatgactccgttaattccgcttgccagcggggaagccaggaatacgattccattggcaatctcctgtgcatcgagaaattccttgcggccatagcgggtcggtatcggaattaacagggcggcttccatctgtgcgtccgtcatgccctgagtcatgggagtcgtcgtgttgccgggggctacagaattgattctgagaccgtctacagcccaggaaggtgagattcggcgtacccagcgggctagagcatgcttggatgaactatagcaggagggcgtctgattccttggaatgtcttccgccagctccagaatacggtcttcatccataacattggaaagcatgtcgacccagtccatacgaactgtcatgttcgtgatggagttggaggaagtgatgacgcagttaccgtgtttcttcttcagtaatggccttaagccttccgccagctgcacgctcgcaaagaagtttaaagcaaatattgtcttaggcggcgcagtcggaccaacaccggcgttgcaaattagaacatcgattccgtcaggatatttctcaaatacggcatcaatggcaccctgcctgccttctttcgttgataaatcggccagatagtctccacccttaaaatcgatattaaatacttcatgtccctgatccagcagtgtctttcttactgcggctccgattccggttgttccgccggtaattacatatgtactcactgttcttacctctctttctgatatctgatttcctgtaaaaattctcttgataaataatagtaattattattaacttatgaaaacagcatatcacagcagaaattgattgtcaattaaaataaaaaattcacaatcatttggtaaaaaacgaatttttctgtattgttgttgcacaaaaatagtggtaaactgggactataaaatgcctgtcccaagaagttggacaggaagggaaaggggacagaatatggccagatttcaatgtggtgtatgcgggtttatctatgatgaggaaaaagaaggaaagcagtttggcgaattgaaggaatgtccggtgtgcagacagccggcgtctgtatttttcccggcaggtggggcagaaaaagcggaacaatcagaacaggctgccgacggtcttgggtacgatccggcctatgtgagagaggaccgctcctgccgctatatgaaagagattcatgagatggcagtaagcggaaatacgattatcgatgccatgggaacgaagatggccatgccgggctgggatgacatcctgattctgggcgcgcagctgaatccgccgccgcttatggagcacgacccggtaaccatcaccacggtgattggaaaacatgcaaagaagcccatggtattagacgggcctgtctacatatcacacatgtctttcggggcgatgtcaaaggagatgaaggtggctttggcaaagggcagcgccatggcggggacagccatgtgcagcggcgagggaggaatccttccggaagagaagagtgcggcgtacaaatacatttttgagtacgttccgaatcgatacagtgtgacaccggataatctgcgggaatcggacgcgattgaaatcaagattggacaggggacaaaaccgggtatgggcggccatctgccaggcgccaaggtgacgccggagattgcggcaatccggaataagcctcttggagaggacgtgatcagtccatccaaatttgaggatattcggagcaaagaggatttaagagacttggttgcccagcttcgcatggcgtcggaagggcgtcccataggaataaagattgcagcaggaaaaatcgaaaaggatttggaatactgcgtcttcgcggaaccggattttattaccatcgacggaagaggcggcgctacgggagcgagtccgaagctggtgagggattcgaccagcgtaccgactgtgtacgccctttcacgcgcgagaaagtatctcgatgaggccggtgcagatatagatctggtcataaccggcgggcttcgtgtgtcctccgattttgccaaggcgattgctatgggagcagatgccgtggccatagcttctgccggactgattgcggctgcgtgccagcaataccggatctgcggaagcggaaactgcccggtgggagcggctacccaggatccggaactgagaaaacgcttaaatgaaagcgcagccgcggcgcgggttggaaatttcttaaaatgcagctttaaagaacttaagactttcgcgcgaattacaggccacgaggatattcacgatatgacagtagacgatttgtgcaccttgaaccgggaaatatcggagtttaccagtatcaggcatgcatagaacagatggcagccagggcggaatttcctgtgatttccgctctgactgcaattgtttacattttttcagggatatagtacaatgagaagcagatattacagaacaggagaatggaaaagacatgaaaaaatatgattatatactggtaggaagcgggctctattccggagttttcgcgtatcttgcaggcaaagaaggtaagcggtgccttgttgtggagaagcgggaccacattgggggaaatatctactgtgaagaggtggaaggaatccatgtgcaccgttatggggcccacattttccatacgagcaaccgggaagtctggcagtttgtgaatgaactggcagagtttaaccgttttaccaacagtccggtggctaattataagggtgaaatgtataatatgccatttaatatgaataccttcagccggatgtggggcgtatccactccggaggaggcgaaagcgaagattgaagagcagagagcttctgtgcagggagaaccgaagaatctggaggagcaggcgatccggctggtgggaacggatttataccggaagctgatcaagggatatacggaaaaacagtggggccgggactgtaaggatctgccttcctttatcattaagcggataccggtgcggtttacgtatgataataactattttaacgatctctatcagggaattcctgtgggcggctacaatgttatcatagacaagctgtttgagggatgcgacatcgagacgggagtggattatttagaagataaggagcggtatgacagtctgggggagacggtgatctatacgggaaccatcgacgcctatttcgggtactgctttggaaagctggaatacaggagcctgcgttttgagacggagacggtggataccgataattatcagggtgtggccgtggtaaattatacggactgcgagacgccctatacgagggtgatcgaacataagcattttgagttcggcacgcagccgaagagcgtgattacccgggaatacccggttgcctggagcgagggtatggagccgtattacccggtaaatgacgagaaaaaccaggagctgtaccggagatatgagacgctggcggaaggggagaaaaatgttgtctttgggggaagactgggggagtataagtattatgatatggataaggtgattgaatcggcgatgaggaaggccagagaggtgttggggaaatagtcagaaatctcaaaataaggaactgcggataggaagacagggagtaaaattgtatggagaaggggatcattggagattcgtgggaaattttttataaagatgaattttcatcaaaaaagcattggcataaggagattgagttcacttatctggttactggaaaactcataatctgtgtagatgaggtaatgcatgaactgcatgaaggtgaattattcgttgtgagcggcggtgtggttcattactatattgagacagaagaaaaatataaagtcggaattgcaaagatgtctttacaggcttttgatggcttttccaaaaaagtaaaggatttctttcgtggtttttattcctctgttctttatgtggcaaaggacgatcagattaagacaattttcagagatattattaatctgatttcaaagcagaatattgtaattcaggaaagcgtccttatttccagaattattgatttgaccgtttatttaagcagtcatgaggaactgataaaaaacagggaagaatatagaaagaatagtgatgcagaactgttggagagaatgagaacttattttgccgagcattataatgagaaaatcggactggcggatatggcgtcccatcttgggttcagtgagagttattgttctaaatatataaagaaaaagacaaatatgaattttctggaatacttaaacagctgcagaatcatgcgggcggaaacgcttttaagaacgactgaaaattcggttacggaaattgcttatgctattggatttacgagcattcagtcgtttaaccgtgtatttaaatcattctgcgacgaaagtcctactgagtatcgaaaacgattacacgataagaagaatgatccgtaatttaagaggaaagcgaaaatagcatctgattattggtcgaatataagaggagcccggcaaaacgggctctttgttttgtcttattcagaaaacgattacttgacaagttataagatgttttggataaaatatgagtggtaaactattgtaatttcgatataattaacaatatcagagggatgagatttattttctcagaaaacgattacttaataaaaaaggtgaaggaggatttatgagagagattagatttgaatatttgaggccgagacagattctggaagccatgaaagaaaaatcaattgtataccttccggttagcccaattgaatggcatggactgcataatccggttggagtagatggatttcatgcatatgagtcggctcttgaagcggccagacggatcggaggggtagtaatgccgccgatctatgcgggacagggcggcaggatgagggaagagacactgagaaatttgggctttgaagaaccatatccgaaggtaaacggtattgacgtacctgctaatttagtgcccagcatgtattgggacgaggatatatacaggctgatgataaaggaacagatccgtcttgtggctgcgtatggttttaaaatgatagtaattgtagtaaatcacggtgcgctgtcgggcgtagcggaagagatggatgaaaagcttgaaaactgcaaagttatttttacctcctgtgtcggagcgaaatttgacgaatatgacgacagaggccatgctacgatgggagaatcttcaattgtcatgtatataagaaatgagtgtgttgatttaacggaattaccctcaaaagaggaggaaccgtatctgctatgcagagaccatggcgtcattgatgcaaggttctttaatccggaactcaataccgattacagattgcttaaggatcccagggacgcgacctgcgagatggggaaagagttctttgaaagcggagtaaaacaggtaattgataaagtaagtgaagagtatgaaaaattacatatttagtataaaagacgaggaggaaaagatagaaaatgaaaagattgatcagtttatgtataacggcggcagtggcagcatctctgtgtgcatgcggttcaaaacaggatacggcagcgacaaatggaacgaatggtgaggcgccggtggcatcggcggagacatcaaccgaaggacaagaaagcaaaagtggaaaaaagactcagttgcgctggatgaatatcgtttcagaaggatcagactcctatcagctttaccaggatgcaataaagaagtttaatgaaaataatgataaatatgagatcgtgtcagatactccaagtgatttaggaaccaagcttcttgttgaatattccgctggaacaggaccggcaatttcgtggtcgctgacagcccaggcgaaaaaactgactgacagtggtttgattgtcaactggtctgatatttatggaaaagactacggaaagaattttacaacgtggtttacggatcaggtacgcagctattctgatttcggagatggtacgcttatgatgctgcccaatgaggcgagtgtagatggacttttttacaacaagactctgtttgaaaaatatggatggaagctgccagagaccttcgacgatttgatcagccttgcagaagaggtacagaaagaagggtattatttgctttctgcgggaggtgcggaaaaccgttgggcatggctgatgtcacagcttatggtaagaacgggaggaattgattcttataatcatctgacttatggcgagggattaaaagactgggcggatcctcaatatggctatcctcaggcgcttgaaaagtttaagcagcttgtggatgctggcgcctactatccgggaacggtaggcatgatggtcaatgaagcagataccctgttttgtacagagaaggtagtaatgtattacgaaggctcctggaaacctggtaactggaagaatattgtaggggaagaatggttgaatgccaatgtgggagttatgtccttcccggctatgacagatatggagaaaggggatcctgaagcgattattggaggtactttaaacggctggattatcaatgagtccctgtcggatgaggaaaaacaggcatgctgtgaatttctggaatccatcgtttcaccggatttttataagggaattatcgagagcggctccatgttatacaccggtaaggtggattatgacagggagaaagcgccggaagctacaaacatgctatatgacagattccagtcaggagtacagatggcgccttccatggactgtgttatggaccaggctatgctggacgcagtcgtaaactctgttccttccgcgttgattaatgacactatgactgtggaagaagctgtgaatgtagtagcccaggttggccaggaatcctatgaggattatatggcatcaaaataatttcgtttaggaagtagatgagagtatgagaaatagaatgagtaagaaacaagagggacagacctcaatagaatttaggtatttaagcaggttttcaaaaggcgtcgtatattttgtactgattttatgtgcagtctgcgttctgtatccgctattttggctgttatctgcttccttaaaatcacctatggatttggcggttaatgtatgggggctgcctaaaaagatagtctttcagaattatattgatgcctggcaggtaggaaaaatgggccactacatacttaacagtgtaaaggtagccctggtgtctatcgctacgacgctgatatgctcttccatgctggcatttatactggcaaggctgcgttttaaaggacgaagtatcatttactatggaattttgctggggcttatgatacctatccatgcgatcatcattccgctttatattacgacccgtgatcttggacttcacaacaatctttactgcatcggtctggtgtatgcagcatttcagatacctttttccgtttttgtcctgagaggatttatggccggcatcccggcttctctcgaggaagcagccatcctggatggctgcggggtgatcagggtgtttctctacatcattcttccactgacgaaagaaggattgattacaattgcgattcttacactaatgtccgcatggaatgaacttctggtggcaatgctgctgatcagcaacgtatctttaaagacactgccgctgggcctgattggatttatcacagagtatgcttctaaatacgcggaactgtgtgcgggactgattattgcctgtttgcccaatattcttttctatgcggtttgtcaggaaaagatgattaaaggaatgaccatgggggctgtaaaggagtgagattatgagattaaaaggaaaaaaattatatctgaccgttttattatttgcagcaccgggactgtgtctatacttattccttgtattgtttcagattattcagggaatcgagatgagcttcttttcatggcctacgttgacagaaaaggtatttgtaggtatacagaattataaaagaatttttactaatgtatacttttggcgttcttttaaaaacacattgctgtatatgctgctgacaagtgctttgcagttgtcgattggtttttttgtcggatatctgctttacctgcagatgagaggttataagttcttccggctggtcgtattccttccggctgtactggcgggaactgcggtggcatttatctggcagtatatgtacagcccggcatttggcatattaaagcctttatttgaactgcttggaatcagcgagtattatattccgccgttatcttcggaaaaactggcgctcgtatctatcatttttgctcaggtctggggaggcgtgggtatacagattatgatgttcaactcttcgtttatgaggataccgcaggatgtggtagaggctgcaattgttgacggggtaaaagggtttggtatgataaagcatattatgtttccattatccctggatgtgggaaaggttattatcatattgcaggttgtaggctctttaaaggcatttgacttagtttatgtcatgactaaagggggaccaaatcacgcaacggagcttttgggaatgacggtttataagactgcttttgagcgttttaaattcggagagggtaatgcagttgcagttgtaatttttgcactttgtctgttaatgacattggttctgcagaaggtgtttaagacggataatgattaaaaaatgaataccgtgtgatatcgttataagaaagccgctgtaaagtcagatgctgatgaatggccacactgtctcaagtgtggtcatttttctatgtcaaatcattgatttgaactatgacgtatgcggtgatttagagatgaaaatacctcctaagcagattttggttatttaccatgtctacttaagaggtatcatatcacatcaggaacctgcggcaccttttttctggaacttataaagtgtcaatataggatattccaaacgtatcggtttttcttgtcagatcgacatccagaagctcaaggatggcgaattcggccagatactgaacttcgcatccgggttccatatgacctgcgtagagcgagttttcttctgatataaccagatgaaagtgaggctctccattaatgatcagtccctgggctgctcccagttcaatcggtttttcgactgttataaactgattgaccggccaatcgtccgttgaggtgattacgtggagagaagccttacggagggaaccaattgcagataataaaattccattttttaaatgtaaacgcttaatttcttccgtcagactttcaagcagtttttcaccctttccaagatgaatgataaccgtccgtccatattgattcgttgtgtaagttctcatttataattacttcctttcttaagagactcttcctggctgcgctgccacacacaaccggagataaagtgaagtaatcgtttacagatacaatgtaacaaatctttccgacatatacaaggaaagattggaaagagaaccgcagatgttaaagaaaacaaaatttttagacagatgccaccgcatttccgcgaattaaagaagggctgaaaatgtattcgcggttatcgatggaattatctttgattcgttccaggattgccttgccggccgccttgccgatcttgtatggatcgtaatccgccacagtaggccgggtttccataagctcaaggtgatcaataccattgaagccggcgatggagatttcttccggaatacggaggtttaactgtttgagtgcctttagtgctccaattgtcatggtgttatttgtagcaagtatcgctgtgggaggttcggagaatgaggccagtttccggatggcatcaattcctgactctaaggagtagtctccgtggtaacgatacggatagctgtttatctctgtcatgccgatttcttccatggcctttgaaaatccttctaggcgttcggctgtattacttaaccgttctggtccttcaatgagatagatgcgcctgtgaccgtgatcgatcagttcacgggtcaataaatacatgcccagcacgttgttgcagtcagcgaagtcaccatgaaaccctggggtattcagccgacggtttacaagaaccatgggaagtgtctggttcagtttcaatataaatttgtcgttttcaccgcaggtgttaagaaccagggcgtctacattctttccgaccagcagctttaaatactggcgttccgcctcagcgttgttaccggtgctgcagacgaccagattataatttgcaggccgtatcatgtcttctacggctttggcgatcataatatgatagccattggagatatccgaggtgatataaccaataatgccgcttgtatttaattttaaacctcttgcagcagaatttggaatataccccatgcggttgactgtgtctaaaacccgattttttatatcaggagtgacatagtagttatcattcagcactcttgataccgttgcaattgatactccgcatgcctctgctacatcctttatggtaagcgtctgttttcccatgtttcacctcctggcaatttttgggatattgcaattctatagtaattgcagtgaacaaaaaagtcaataatagaaggcgggaaaacgattactggacaaattgtaatccgcttatgataaaaaatgagtagaagaaaaggaccattccgctataattacaataagagcagaagcgcggtatacgacgcttattatgaggaggaattgctatgaatagtgagaatcaggaacttttaaagctgtttgagccattgcgtgtggcagatgtccgcgacggaatggactggatgggatatcaccattacggaaccatggattataagatacgcccgctgtatcgcacgaaagcggtaggaattgccagaacagcgcggtatcttccgtatgaaggaccggatccggaggtaaagggagacgcatatacagagtggtctaactggtattacggaacaatctgtacctatccatggtttaatgagattgaggaaggagattttattgcaattgatatttcgggagttgacgttggactgatcggatctgagaacggacttggagctataattaagggcgccagagggtttgtaacaaacggcggcggaatacgtgacacggatgaggtgatactgcagaaaataccggtgtggagttactttgtttcacaaaagatggatcaggtcagagtacagttcgatgctaaggatgtaccagttgcaataggcggagtcactgttcatccgggtgatgtgattgttgcagatggtgatggcgtaatcgtggttccacgtaagattgcgaaagatgttgcaaaatatgcgcataaagagctgtataaagataaaaatgcaagacgcgaaaagtatgaaacacttggatgggaattagatgatactgtaataaactaattataaaggttaagtaatcgtttacagactgccactcgtaatacaaatttccctgtctgccgaattttggaagacagggtagcttttagtaccacaagtaaacgttttctttaaaggaaggtgaagcatttgcaggttggctgtgggctggtctcagtacgcgatatcggaccagccagtgaggctgggtttgactacatagaatttatgggtaaatatctggtttccgcatcaggaagggaattcttgaagattcttaatacgataacgaaatatgatataagatgccggggattaaacggatactgtcctgaggagattattatcgcggggccgggttttgatttgggaaaggccaggagatatgcaaaaactgtggcagaccgggccaaagaactggacgttgttgtggttggaatcggttccccatcttccagaaagcttccggaagactttgacaggaaaatagcgaggaaacagctaaaggatttcctgaaagtaaccgcagaagaactaggacgctatggaattaccgtgtgcttagaagccttggccccgtgttactgcaattttgttaatacagttgaagaggcggtcgaaatcacacgcgagatcggctggagttccattagaacggtattggatttttataatatggaatattcaggagaagccgattccgatgtaaagccgtggctgaatgagattgcacacgtgcatatttcagacgatgcaggaagcccgtttcaaagggattttttgagagaggaaaaaagtgggatccataagcgcaggctgtacaggctgtttcaggccggatatagaggtctggtgacggtagaagtagatttacctgtcaatggtcccaaatcattcaattcattgcatgtaataaaaaatgcttactaaaagattttcatatcaggaggaaattaaatcatgagtaaacaacaaagaaaagttatcatttcagcagcaataaccggcggtgtccacaccccgaccatgtctccgtatcttccaaagacgccggatgacattataaagaattctatcgatgcatacaaagcaggcgcggcggtggttcatatccatgcaagaaaagaaaacggtgagccgacggcggatcataagacgtttgaatacattttgtcctctatcaaaaaagagtgtgacgtaatcatcgggctgacaaccggaggagcgcaggggatgacggtggaggagagactctccgtaatcgaccggttccgtccggagatggcttctgccaacggcggttccatcaacttctgtttcagcaggcttgcggatacgatggagaatccggagtatgactgggagaaaccatttatcaccaggacgtatgacaatatttttaaaaacacatttaaggatatggagtactgcatcacgaccatgaataaatgcgggaccatgccagagtatgagatcttcgattacggacagttaagcaacctggcgtattttaagaagaagggcgtaatcacccagccaatctacttacagtttgtacccggaattatgggcggtatgccgatcagccaggaaggtatgatgttcatgatcgaccagtcaaagaagattctgggaaacgatattcagttctgcagcgtgggcgcgggtagaaggatgttccgcaccgagacgctctgcgccttaaacggcgggaatgtgcgtgttggactggaagacggactttacataaaaccaaacggtgagctggcggtggataatgccgcacaggtgacgaaaatcagacggattctggaggatctcgattttgagattgcagatacgtcagatgccagggaaatgctccatttaaagggaattgatcaggtcggattctaatatccggcggacaggaggagaattatgtttcaggacgtagtagtagcttcggcggtcagaactccggtaggaagctttggcggttcgttaaaggatgtgagcgccatcgatatgggcgcaatgacaataaaggaagccgcaaaccgcgcgggaataccggcttccatggtagaagaagtggtgatgggctgtgtggggcagtacggatataatccgtttcttgcgagactggccggcttaaaggcaggatgcagcgtggagagttcaggccagaccgttaaccgtctttgcgcttccggtctccaggccatcgtcaccggtgccatgactgtggatcatcacgatgcgttaatctgcgcggcaggcggaaccgagaacatgagcagctatccgtacagctcctttacaaaccgctgggggaaccgtatgggaaatacagagctgaaggacaatttaaccatggctttaggcgagccggtggcaggcatgaatggaaaggatatccacattgccattacagccgaaaatattgctgaaaaatatggaattacgaggcaggaagcggatgcctacgctttggaaggacagaagagggcgaagcgggcaattgaaaatggtacgtttcgtgaagaaattcttcctgtggagataagagttaagaaggagacgaaagtctttgacaccgatgaacatccgagagagacttccctggaaaagcttggaaaactgcgccccatcgtaaagagcgacggagtggtgacggccggcaatgcctcaggcatcaatgatgcggcagcggcagtgattttgatgagcggcagccaggcgaaggagatgggaattactcctcttgccagggtaatcgactacgccgtggcaggtgtggaccccgattatatgggaattgggccggtggcagcgaccagaaagctgttggagaaacagaagatggagttatcagagattggcctttttgagctgaatgaggcgtttgccacccaggcaatcgcctgtatccgggagcttggccttgatcctgagattgtcaatgtaaacggcagcgggattgctctgggccatccgatcggcgccaccggggcggtgatttctgtcaagcttctctatgagatgaagcggagaaaagtacgctacggcattgcctctctctgtatcggaggtggacaggggctttccgtattgtttgaaagtatgtgacagcagatgctttggcggatgaaggaggacttttaatatggaacagtttaaaattatcgttctggatgacgatccgacgggaattcagacagtacacggcgtctgcgtctatacgaactggagcgaggagagcatacgggccggatttgaagaggaaaatcccatgttttttatcctgactaattccaggggatttacggcggaggagacgagaagcgtccatcagctgatcggccgccgtatcgttaagatatcaaaggaacagaaggttccgtttgttctgatcagcaggggagactctaccctgcgcggccattatccgctggagacggagacacttcgtgaaaccctggaggcggaggggattactgtggatggagagattctgtgccccttcttccccgaggggggacgttataccgtcggagacgtccattatgtggcagaagggacaaggcttattccggccggagagacggaatttgcaaaggaccgtacatttggatataagagttctgacttgaaggagtggatcgaggagaagagcggcggccggtggaagaaggatgaggttctttcggtctctgtcgcagagctgagaggcaaaacgctgaaggggacagaggagaagctgctttccttaacaggctttcaaaagctgatcgtaaatgcagtggaataccgggatgtggaacggtttgcagaggtctgcaaagcctgtatcagccggggaaagacgtatattttccggaccgcggcggcgtttcccaaggtgttaggggggattacggatcagaagcttctgggaaaggaagaactggtagagcaggataatccgcacggaggcctgattatagccggctcccacgtgacgaagacgacgaggcagctggaggaactgaaaaaggatgagagaatccggtttattgaatttaacgtcgctctcgtgacggatgaggagaagtttcggagggagcaggaacgtgtcatccgcgagacggatgaggcgctggcagcaggcgtaacggctgctgtctacaccagcaggaaacgtctggatttagataccggaaaccgggaagatgatctgcggctttctgtgaagatttccgacgcagtaaccggtattgttcctgcgttgtcggtccggccttcgttcctgattgccaaaggagggattacctccagcgatatcggaacgaaaggcttaagggtaaaaaaggccatggtggccggtcagatacttccggggattccagtctggaaaaccggtgaggagagcctgtttccgcacatgtcttatgtgatattcccgggaaatgtgggcagcgatacggccctttacgatgcagtgcagaagttgattggatgacaggaggaaatgaatatgcggtttgaaggaaaaacagcggcagtgaccggagcagcccaggggattggccgggcaattgccaaaaggctttatgacgagggcgcgaaggtagcgctgctcgatatcagcgatgagaaggttaaggaagcggcaaaacagatcgacaaagagggagtgcgcgccgtcggttttggatgcaatgtggcagaccaggcttctgtaaacagcgtaatggaagaagtagaaaagcagctggggccggtggacattctgattaataatgcggggattacccgggacggtatgttccataagatgagcacggagcagtggaatcaggtaattgatgtgaacttaaacggaattttcaactgcacccgggccgtaatcaccgggatgagacagcgcaaatacggtaaaatcgtaaatcttgccagtgtgtctgcttttggaaatatgggacagaccaattacggagcttccaaggctgcggtaattggatttacaaaatgccttgccaaggagtcggcccgcgccggaattacggtcaacgccatagctccaagctacatcaatacggagatgctgcaggctgtgccggaggacgtaatgcagaaattcattgcagcgatcccatccaagcgcctgggaacgccggaggagctggcggctgtcgcggcattcttaagcagtgacgattccagcttcgtgaacggtgagtgcatcgtcgtatcaggcggctcctacatgtaacagtctgttatggcggaaaggaaagcaggaggaggaacgttttctggatgaaaacggcgtggttgaaggcaattaccgcatcgcgttcatccgggatcacttaaagtggcttcacaaggggattacagagggaagcaattgcttcggataccacctctggtgcccgtttgactgctggtcgtggaccaatgcctataagaaccgctacggtttaatccgcgtggataccgaagacggatgcagccttcagccgaagcgatcggcggcgtggtttaagcaggtcagcagcagtcacaaagtatcagattagcctgtaaaataataaagcatacaaaaaagatgcagaacctgccgcaccttttttgtatgcttttctaatctaaatcagatctttcaatgcagtggtcagccttctgttgtcctcaccattcctcacagcaatcctcacatactgccttccattatgaagctttggcgtcagatctttgatgaaaatatcatgctttaacagttcgcaggcgatttcccggctggtgcggccttccgtgacctcacacatcacgtagttggcctgtgatggaattggccggagatatggcacagagtctaactctttgaccagttgccttctgtctgcggccagcttctttaaggattcacgataatcctttttgtatttttcgctgttctgcataaagaattcgccgaaggagttgatgttccagatcggcgcttctctctttaatagggaaatcatggcctcgtcggaacttgccagaacacccagccggattccgggaactccataggatttggagatgctttttacaacgaagagtccgctgtaagagtgcagcacctcctcattgatcagggaaagatccagggcctctgtatctcccggcagctccgcaaaatcagagaagctttcatcaattatgaggcgaatggaattcttcctgccccagtcaatcagttttttaagtccttcgctgtcaatgtaattgccgcttggattatcggggttaatgagaaccagtgttctgaccgcatggtccgggcttccaaagtattcaattaaatcttcagccgtataggaaaaatcttcattatccggtgtaaagacaaccgataatgcgctgtcatagcggttgggatattcctcgaaggtaggacggataaagcctgtaggcccttctgtgtgttccataagtaccttaatcagctccgcggcgccatttccaatcacgatgtgctcctgccgcacgccaaaatttctggaggccagcagactgttgatccgcatgccggaggggtattccgagatcagaatctcaaaattggatttcatctcgtcaagcatcttctgaggcggaaaatagggattgacgagatagcagaagtccagcagcttcggataacgccagtgaccgccgtaacgggaagcaatcgcgtcatagcgcttctctatggtatcggcgaagaggctctccgcaatatccagatcttgaatgtcatcgatctcgtaccagacttgtccgctcagcctcttggctttgatctcctttgtctcaagcagtgcaatgagcttgattacggattcatagtattcgttgttgcccatggccttcgcatacgcctcgaggaagggaacatacgtgtttgcagaaaaatgctgactgaatttatagatgtttacagtcttatagtagccgcctttgtcttcaaattttaaatatttgccggggatgaaatctttgatggagtcgtcgtcatctaacaccatgcaggttccgtccatccagcttgcaaacttatccaccagggccagcgtctctctgggatcttcgatcaggatatccaccagagcttcctcaaaaatgatgtcagattcaaagagcagcgtgtcttccgatatcagggattcttttgccagtgccagggaatagatgttgtttgtcttgtcgtaaaccttattgttgataaagcagactggagtctgaatgcccagcgtggtgatatagtccataagcttcctgccttcatatccaacaacaatgataattctggaaagttgctttttatcgagaatgcgcagcgcgcgttcaattaaggtagtcccgtttacctttaccatacacttcgtattttccgcggtatattccttcagtctttttcccatacctgcggccaggatgattgcctgcatcacgttcctccaatctgtgtccgtttacggacgctttgagattcagaactattttatcacaggagggggacgattacaatgcagaaacgtatggcacaccaccaatggaggattatggaattgctggaattattaagaattcttacaattttcttataaaattacgattttctccgatgctttacttttaaaaaacgctatagtataatgagattatctgctttttagagtatggaatgcccgtttctttcgggaaaaaacggatgtatcaggaggataaggatatgttacaggcattgaaaaaggcggcggctgtcgcagcgcttgccgctttcatggtgttgggatgcatgacggcttttgccgacgatgagatacagaatccaccgtctccccatgttgtatatcaggtgtttaccaatggtcagtggaaaaatgaggctatggacaggcagccggcatcagattcggcatcgccggtggaaggcttaaaggtatggcttaccggtgtggatgggactatttcctaccgcgtatacttacacgacggcggctggcagggctgggtttctgacggcgctgtggcaggcggagagaataccggtaatcagattgaagctgtacagatgaagcttggcggatatgccggacaggtgctggacgtctggtaccgcgcaactgtatcaggaagggaaaagcttggactggcaaagacgggaagtccggctggaaccgtaggggaaggagcgcccttaacgagtctggaagcttatttaacggaagtgaatcacaatgagagcgacggtaccccggctgtcagaacgaacttcccatttggattttatgatgacaacggcgtgacacgctacacagatgttccgggcggtatctatacaggctgggtcgatcacgacggcgtacgttactatgtcagagataattctttcctgaccggctggcagtacatagatggattgaaattctattttgatgaacagggaaagctggttcaggatctggatccgattatcgggattcagagttcttacgtgattaagatcaacaagcagttaaacacactggttccatacgccaaggatggcgacaacggatatattattccggttaaatcgatgctttgttctgtcggtgacgatactcccttaggaaccttccacacaccggaaaagtaccggtggcgtctgatggtaaacgatacgtacacgcagtatgctaccagaattacagctggacagggatttctgatccattcgatctgttacgacaaacccgatatctatacgatgcagtcggtgggctataacgggctgggcgtggtgcgttcccttggctgtatccgtctgaccgcacagaatgcaaagtgggtgtatgataactgcccgatcggtactacgattgagatattcgaagatccgttaaatgtgggaccatattataaaccaaccataactccgattccggttgaacagacatgggacccgacggatccgctggtaagtgaggatgttaagaatcaggcagctgcagaacagcaggaagaagcagcgcgccgccaggcggaagagcaggctgcagccgaacagagagcagcagaggaagccgcgagagcagccgaagaggcagcaaaacaggagataggaccgggatacggcctgtaaaccggtaagataaaggaacagtgatgaatctgttgtgaacagaggcatcactgtttttgtataatcacgaacttctattccagggaggccagccgtataaactcatccatttccctggttttccatttatctttgtgataaaaaatctggcggtacatggaagcgtgaaaatctatgacatcgagaacacggatgtgcccgctttcggcgctttcctcgactgcaaatctggggagaaaggagaggcccttgttttcttcgatcattttgaggataaactctgtattgctgatctccagaaatggggtaagcaggatgttcttagaggcgagataacggtcgaaggcctttctgtaattggcatttttttccgtcaggaagaatggctcccccagcagctcctccagccggatttcctttttatctgccagcgggaaggaaggggaggagaggaaaacgatctcttccttctgttccatgactttataccagttgctgttaaagcgcggctcgtccagaatatagatcagatccagctgattgcgttccatcatttcgatcagttcttccggcggcgccgtggtgatctgcaccgctacttttggatgattctctctgaaatagcggagaatggaggggaattttgagaaacacagcgattcgatcgtacctacgtgaagtggattctcaagctccgctccgccgctgacagacagctttgcccggttgacctcatacaggatatcatatgcacttgtgaggaaacggctgccctggggcgtaagcgttacctttcgtccaatccggtcaaagagcctggtccccagttcctcttccagaagccgaatctggacggtaacggcggactgtgaataaccaaggctctctgcagcctttgagaaactctgaagctgggctgcccggatcaatgtgcttaactgccgaagttccatttgcttcctgtcctcctttcaaaaggtaaaatattgatgaaaattattcaataagtacataaaatatatgaattggattcatacataatgccatgatataatgagaccataaagatgtcaaccgtgaaatgataaaaacaggaaacggtgcagggaggttatcatgtcatttatcagtgtttttgatgtattagggcccaatatgatcggcccctccagttcccacacggctgggacggctgttatcgcgtatctggctcagaagatgataaacgggccgcttaaaaaagtggaatttacgctctatggttcctttgcaaaaacgtaccggggacacggtacggatcgtgcgcttttagggggaatcatgggattttccacagatgacacaagaattcgggattctttccggattgcagaagagcgcggccttgagtatcattttatcgtgaatgagacggacacggatatttatccgaataccgtcgatatccggatggaaaatgaggccggacaggtcatgaccgtgcggggggaatctctgggaggcggaaaagtccggatcgtgcgaatcaaccaggtgaaggtggatttcaccggggaatacagtgcggttatcgtcgtgcaccaggacaagcccggtgtggccgcccatatcacgaaggtgttaagtgactgcagcgtcaacattgcttttatgagaatttttcgtgaagcaaaggggcataccgcttataccattgttgaatcagacaaccgtttgcccgggaatataactgaaacactgagagaaaacatacatgtacatgatgtaatgatcgtacagtcgtaagcaacagggccgcccgtgtactgatgccggaaggcaccgggcggtacgaatgaggagaagagaaatgatggattttaaaaatgccagagagcttctggaattatgcagcgagaaccagtgcccgatatcagctgttatgcgggagagagaatgtgatcagggagagacgacagccgaagaggcggatgatcgtatgcggcgcgtgctggaaattatgcgttcttccgcatacgagccgattgaaaaaccggggaaatccatgggcggcctgatcggcggggaggccaggaagctgtctgcccgcagagaaaatggaaaggctgtctgcggcactgtcatgagccgtgcaatcacttacgccatggccgttctggaggtgaattcctccatgggactgatcgtagcggctcctacagccggctcttcagggattgtcccggggcttttgctggcgctccaggaagagtatgggctggctgacgacagactgatcgacgcgctttacaacgccggtgcgattggctatctggctatgcgcaacgcaacggtggccggtgcagtaggcggctgccaggccgaagtcggaatcgcttccgccatggcagcatcagctgcagtagaactgatggagggagctccggagcagtgcctctatgccgcctccacggtccttatgaatatgcttggactggtctgtgatcccgtaggcggcctggtagaatatccctgccagaaccgcaatgcttccggggcagccaatgccctgattgccgcagagatttccctgagcgggatcaggcagctgattccgtttgatgagatgctggttaccatgtattctgtgggaaagaaactgccttccgagctgcgggagacggctcttggcggatgtgcgtcggctccgtcggcgtgccagttatgccatttgatgagtgaaacgtaaggaggtccgaggttccaattcacagccccgccggcctcggctttccggtcttccacggctggattatgcggccattccagttccggtttcggtcataagcacttctaaacgtgcaaactttttctaaaagccagggaaaatgcccaaactcgctgcgctctgacaggtgggcatttcccctgaacgaaaaattttgcgcgttaagaattgctaattccctgcaaagtcacaggaatggccgcataagccagccgtggaagaccggaaagccgaggccggcggggctgcgaattggaaccgtccacaggctattttaaaatctccgtttacttttcccctccaatattgtagaataaaacggaacattgttagaaattggaggcagacggatggcaggtttttatgaaccggagatcctttcccgtgtacaacagatggaattggagatacttaaggatgtcatggagctgtgtgacagccacgggcttctctgttttggtatggcggggacagcgatcggagcgattcggcataagggatttattccctgggatgatgacattgacgttgccatgccaaggaaggattttgagtgccttttgaagctggtggaagaaaagctcggtgataagtattacgtcttaaactggcggaccagtgagaattatccgctgatgacgacgaggatctgccgccgcggcaccagattcgtggattctcccatgagggatgtggacagccctctcggtgtttttttagatatgtacgtatacgatgatataccggattccgggtttctcatgaagcttcaggcatgggaggcctggtttttcagtaaacttttaatactgcggtcgattccccggccttatctggctcagacgggatggaaggcgaagctgatcaccgctgtctgcatcgcggtgcatcatgtgcttaaggggctttgcatctccaagcggggactggcttcccgctgtgaaaagatctgccgccgttatgaggggaagaatacgaagcgtatggccttttatccggatacgaatccattctggaacgtggtggaaaaggcggcgttttcaccgggactgaagctggattttgagggattcaagctggtatttccgagaacagagcatgatattctgacttatatgtacggggattatatgcagatgcctccgatagagaaaaggaagactcattatccttatattctcgacctgggagacggtacggtactgtcggaagagacggtcacagacagaggaatgaagaagacatgaaatggctcagacaaaggatgttcggcagtctaagcacaggaactgccgcaatcgaccggcagaatattgcctggaacatgatcggaagcctgatttatgccggctccagcatgattctgactgctctggttaatcatttaatcggtccggagcagggcggtatcttcggatttgcgttcagcacatttggtcagcagatgtttctggtggcttattttggtatgcggccgcttcagagcaccgatgtgaatcaggcgtataccttcggagagtaccggagggtcaggctctatacgtgtatggcggctgttctgttcggtattacttatatttttgttaatacttacttcgttccgaacgggtattcgcgtcagaagacactggttgtttttctgatggtggtttataaggtgctggacggcttcgctgatgtctatgaatctgaatttcaacgggccggacgcctgtatctgaccggaaaagcgatggcttaccggacgattctgtcggtcatcctgtttctgggcacgctctttttgacgcgggagctggtattttcctgtgtaattgcggtgctggcccaggcagctggaattctgctgtttgactggaatctcatgaagctggtgcccggagtggacatttcgcgtgcagcggggaaatccctggctctggtccgggaatcgttccttctgtttctgtcagtcttcctcgatggtctgatctttgctatggctaaatatgcggtggatgcgcagatgactgcaacggataccgccatctttgtggcagtctttatgcccacctctgtcatcaatctggcggccaattttgtgatacggccgtttttgacgaagatgtcctatcagtgggagggaaagaagtttgatgagtttacccgggatttaaagaagctgatggccattatactgatattaacgattattgcgctggccggtgcatgggcgatcggtgtgccggtgctgggggcaatctctaatgtgaagctggcgccttataagtccggacttctgtacattattctcggcggcggattctttgcagtcatgaatctgttttattatgtgcttgttataatgaaatgccagcgcaggatcttcttcggatacgttcccgtgtgcattctgtccgcgattctttcgtttctgcttgtgaagaccggagggatcaacggtggggcattgtcctatatgctggaaatgctggtgcttatgatgtgctttatgggacaggcattctacgtattttacaggacgaagaaacaacagggaggacgttagccatggacaaggtgctggtgattatacctgcatataatgaggccctcaatatcgagcgggttgtgacgagactgcaggaggaatatcccatatacgattatgtgatcgtcaatgacggctctgcggatgagactgcggcgatctgccggagccgcggatttcagctgatcgatctgcctgtcaatttagggctggcaggggcgtttcagacaggactgaaatacgcataccgcagaggataccgttacgcgatccagtttgacggcgacgggcagcatcggccggaatacattggagcaatgcgggaaaaaatggatgagggatacgacatcgtgattggttcccgtttcgtcacggagaagaagccgaattccatgcgcatgctgggaagcagactgctctcaggggcgattcgtctgacaaccggcgtctccgtctccgatcccacctccgggatgcgcatgtttaatgagcgcatgatccgggagtttgcagaaggcttaaactatggcccggaaccggatacgatttcctatctgttaaaacagggcgcacgggtcgcagagatccaggtgacgatggatgagagaattctcggtgagagttacttaaagcctgtgagcgccgcccggtacatggggaaaatgatgttttccatcctgcttgtacagaattttcggaaacgcggcagaagataagagaagggagaacgtgcgatgaccgttatacttcggtgtgtactgattgtagtttccatactgctgacattctttgtgctgaaaaagatccggcagtctaaggtgaagattgaggattccatattttgggtgatgttcgccctgatgatggtggtattcagcattttcccgggattggctgacattctgtctgattttgtcggaacgtattccacatccaatttcatctttatgtttgtgatctttatcctgctggtgaaggtgttcttcctgtctcttaagatttcccagctggaaagcagggtgacggagctgatccagcagctggctctcgacagaaaggaagaagcagacagaaagagggtggctgacagggaggaagaggcacgtgatgaaagcagatactgttaaaaataaaaagaaaataagtctccaaactacaaaagagatcgcgggacagagcggcctgtggatggcggcagccacgatcctttttcttattgtagtctttgtaaagccgtatcacagtgtgattgacgccattccctctccggattatgagtctgtgcgcctgttttatatctggattttgcggcttgggatcctgtttctggctgttcttgcaggtatcctgtgggtatacgggaagaaaccaggctggctgtttccggttaccataatctgcctgggattcttttatatgatgattctgccgccgttttcagctccggatgaaccgcgtcatttcgtcagcgcttaccggctgtcaaaccagattatgggaaaggaagcggtggcggatgagtcgtttcttttatcggcatcggatcaggagaaggaatatatcgcccggggcggcaatgttctggtgcgggagcaggatggcagggaggaaccgtattccagtgtgggaagagattcttatgcgctgatgcttagtgaactgtttacaaagaacacagggggcggtactacggtccgtttcgaggcgccggtgaacacgacgccggtggtctacttacctcaggcgctggggatttccctggcaagagtgctgcacctgggatatattccgctcatctatatgggacgtctgttcaatctgctggcatttgccggaatggcatggctggcggttcgcatcatgccgtttaagaaagaattgtttatggccgtaagtcttctgcccatgacgcttcacctggctgcttctctgtcatacgatgcagcgctcatcggcctgtcgcttctgttttttgcctggtgcttttatctggcctatgagaagaagcagatcggaatccgggacacggtggttctgggacttctgctggtccttttagagccgtgtaaaatcgtgtatctgccgctggccggtatctgtcttctgattcctgcgtcgaaatttggcacaaagaaacagtactggatatcggtagctgcggtgatcgcggtgatggcgctggctattttcttaattaataacgtggtgctgtctgcctggattcaggatacggagaatataatcagctgggaaggcggtgcggccggttatacgattcaggatatcttaaagcagccgtaccaggcgtttctgatttactatgagacactggtgacacagttcgattactatcaggccaccatgctgggcggttatctggggaatcttgacccgaatctgacggtgccgtatttctgcctgtatctgctgtggggaattttgatcgtgagctctgtgcggaaggctggagagcacactcccatgaaaactggtcataaagtctggattgcggttttggccttcttaagtatagttctggtgctgacatccatgcttttgggctggacgcctaaaggctttacctatatcgcagggattcaggggaggtatttcctgccgattcttccgcttgtcctgctgatgctctatggggataatctgacagtgaaacgggattattcacggggaacctattatctggagtgtttcgtcagtatttacgcgcttgtgagaatctgttccatgacctgtatcagataattatgggaaataaagatagaataactgatataccgtagaaaggctgaactatgactgcagaaacgatggaaataaaacgcacagtggatgtaattattccggtttataagccggatgctgtatttgaaacgcttttggagcggctgggaaagcagagttatccgatccggcgcattattattatgaatacggaacagtctttctggaaaaatgaggcttacgaggctgtcccgaatctggaagttcaccatgtgaaaaagagtgaatttgatcatgggggaacgagaaacaaaggggcgtccttttccgaggctgatatcatggtatttatgacggatgacgcggttcctgcagatagagagttaatcggggagctggtaaagggcttgagtttaagcgggccggctggggaaccggcggcggtggcctatgcgagacagctgccaaacagtgactgcgcattagcggaaaaatacaccagatctttcaattatccagaccagagccgtatcaagacgaagggcgatttaaaagaactgggaatcaagacgttctttgcctccaatgtctgctgcgcctatgaccggaaactttttctggaagccggcggatttattagccgtacaatttttaacgaagatatgatatatgccggcaatgcggtcctggatcggggccaggccattgtctatgccgcaaaggcccgggtgatccactctcataattatggctgtatcgctcagttaaagcgtaatttcgatctggcggtttcccaggcggatcacccggaggtattcgagggaatccgctcggagagcgagggaatccggctggtgaaaaagacgtgcagatggcttatggaacagaaaaaaccgtggctgattcccggagtgattgtaaaaagcggatttaagtatctggggtatcttttggggaagcggtatcggaagcttccgatttggatgattatgaaaattacgatgaatcgggagtattggagaagaggctaggaaaatatattgtgaaaatgagtgaaatatacaattgctaattgtaaaagagcaaggtatatggtattataaagatgggtgctgccaaaacggtaagcggttcgcctttcgccaaaatgagtacattttgagaacttcccgtatttccggaggtgatacatatgtggaaaataaaaacgaaaggaagaaatgatgttaggcattgttgttggaattgtcggtatcattgtaacggttattagtatcatagtgacggttataagtatcaggcatactgacaaaaaagacaggataaattgacatcaaaaaagcaaccgcgctgcttgccaaagtagtagttgcttttttgaaggtaactattaacaaaggtgaaccgtttgcaatggcagcacctttttgtatttacattgtaacagagtagattgacgatgtcaagaatttagaaagaaaatttggcttttagggcagattgtaggaaacataagggaagtagtttgcctggaactgaagacttactttatcatgataagtgtatagaatacaatttacattaaataatggtaaaaagagaaatgatgttaggcattgttgtaacggtcattagtattatagtgacagttataagtattagacataccagcaaaaaagactgaaatcaaaaagcaaccgcgtctctccaaagttgtggttgctttttgttaaagtaactataaaccaaggtgaaccgtttgcaatggcagcacttttttgtatttacattgtagcagagtaaatttcatctgtcaagattaagagatacacgaattctcaggtaaaatccgccatccagtggaaatttaagcggagttgtgatagaatgctacaagacaagaaatgacaaattgtaggtaaggagcataaaaatatgggaaagataaaagtaacgccgtgtgacattaaaggactctatgtgattgaaccgaccgtatttccggattccagaggatattttatggagacctataaccagaatgattttaaggaagcgggactgaatatggtgtttgtgcaggacaaccagtccatgtctgtgaagggtgtgcttcgcggccttcattttcagaagcagtttccgcagggcaagctggtgcgggtcgttcgtggaagtgtctttgacgtggcggtggatcttcgttcggattctgagacgtacggcaagtggtttggcgtcgagctgacggcagaaaataaaaagcagttttatatcccggagggctttgcccacggctttctggtgctgtctgacgaggcggagtttgcttacaaatgtacggatttctaccatccgggcgacgagggcggaattctttggagcgatccggagatcggtatcgactggccgatcgaggacggtatggagttgatcatttccgacaaggaccagaagtggagcggaattcgggatacatttaaattttaaccggagaggagcggaccatgaattatctggtttccttatgtaaagaaattgtacacaagagaaaattgattctggacctggcaaaggcggactttaaaaagcggtttgtgggttcctatttcggtatcgtgtggatgttcttacagccgcttgcgacggtactggtttatttctgcgtattccagctggggttcaagagcgtgcctcctgtggactacccatacgttctgtggctgcttcccggcattatgccgtggttttacttcagcgaggtgatgaacgccgggactaactgtctgcaggaatacagctatctcgttaagaaagtcgtcttccgggtggagattctgccggtgatcaagatgctgtcctgtatgatggtccatgggatttttgccatcatcatgatcgtcgtctttctggcttaccggattccggtgaaaatcagctggatacagattatttactatacgtttgcctgttccatgctctctctggcgttaacgtattttaccagcgccatcaatgtgttcttcaaggatatggcgcagatcgtagggattatccttcagtttggtatgtggatggttcccatcatgtgggcgccggaaatgcttccgggtgcgccggagtggctggacaaggtactgaaattcaatccgttctactacattgtggccggttaccgcgacagcatgctgaccggggacggattctggatgcgtccgaccctgggagtctacttctgggcggtgacgattgtgctgatgctgatcggactgaaggtatttaaaaagctgcggccgcatttttccgatgtactgtaagaggcccgaaatggaggataaaagagcggtggaatcaaagaatagtgcgatttcggtaaaggatgtaacaaagatttaccggctatacgacaagcccatcgaccggttaaaagaggcgatgagcattacccataaaaattatcacagggatttctatgcgttaaacgggatttcctttgatgtaaataaaggcgagacagtgggaattatcggaaccaacggttccggtaaatctacgatcttaaagatcattaccggggtgctgaccccgacgaccggcgaggtggaggtggacggagtgatttccgccttactggagctgggcgccggatttaacatggattacactggcattgagaatatctttatgaacggcaccatgatgggattttccaaaaaggagatggaggcgaagcttcaggatattctggattttgctgatatcggagacttcgtctatcagccggtaaaaacgtattccagcggtatgtttgtgcggctggcttttgcgcttgccattaatgtggaaccggagatcctgattgtggacgaggcgctgtcggtaggcgatgtcttcttccaggccaagtgttatcggcgcatggaggagatacggaagaatggaaccaccattttgatggtgactcacgatatgggagccattatcaagtactgcgaccgtgttgtggtgcttaacaaaggcaatttcatcgcccagggagagccggggaagatggttgatttatataagaagattctggcaaatcagatggatgcgctggaggaggaactggtggaacttcgttctgatgagttaagtgatttctcaggagacagtgcggccgccgggcagagacataaaacggaatcacacggcggtctcatgaaggaaaagctgacgatcaatcccgcgaagacggagtatggagacggtcgggcggagatcgtggatttcggtctgtttgatgagcggggcaacttgacgaacctgcttttaaagggcgagatgtttaccattaaagagcggatccatttcaacaccagtctggatacaccgatttttacgtatacgatcaaggataaacggggagccgatttgacgggaaccaataccatgtatgaatcggcggatgtgaagccggtgaagaatggcgatgagtatgaggtggaattcagccagaagatgacgcttcagggcggcgagtatctgttgtccatgagctgtaccggatttgaaaacggggaacatgtggtatatcaccgtttgtatgatattgccaacattacggtaatttccaataagaatacggtgggcgtctacgacatggagtccgaggtgaaggtggccctgaaacgaggaggaaaatgatatggggaacatcggttccgaagtgaaagatcttctgataaagtatcacggcgatacgaagctggcaatgaaggaagagccggaactcaagtatttccttgcgctgtcggttacccgggaaaatgtgctggagtggtttgagttcaaggagggggcctatcttttggaggtcggctccggctgtggcgcgctgactggcctttacagcaggcgggtgaaggaagtgaccgttctggacgaagattccgaggacctggaggtaaaccgcctgcgccatgaagcctgtggaaatatctgttatgtgaagggcagcttagacacgtatgaaggcggtctttttgattacgtggtgatggcaggttccttaaaaatgccgtatgaagcgcagattaacagggcaaaatcgctgctgaagccaggaggaaccctgattgtagccgtggacaaccgtctggggcttaaatataagtcgggtgtaaaaccggacgaggcatgtctgcttaagaatgagctgacagagcttctgtgtggttcatctgatggaaaaaacggaacactcacatattactatcccatgccggattaccgtctgccggtaaccatttattcggatgagcatctgccggtaaaaggggaactggctcacgcggtcctcgcttacgattatccggagtatatccggtttgatccggggaaattttacgatgaaatctgtgaagccggagtgtttgaaacgttcgcaaattcatttttagccatatggagcagctatgaagaagactaagtatattaaatacaacaggacccgccgggaagagtttcagatacgtacctgtattgtggaagaggacgggaagcagtatgtagagaagacggctttaaacgaaccggcagtcgctcatattcgttcaatgaaagagaaatacgaccgtctgaccagccagagtccgctgggagtagctgaaatggcgcttagcggagatggaaagaccgcgcgttttgccttcctgaagggtgaaaccatggctgagattctgggacgcaaaataatggatgggcgcatcccggtggcggaactgaaagaagccatggaacaggttctggaggttcgggaaggttatttaaaaccgtttaagaggacggatgagtttatcgccgtgtttggacagtgtgcggatgagagcggagaactggaggcggatgaggcgtttgatacttccaacgtggactgcctgttcgagaatatcatggtaacggagtacggcccgtgctgcctcgactacgagtgggtgttcttcttcccgattccggtacgctttatccgttaccgcatgctgtactatttttacgagcagtacagaagccttttgggagagacgacgctgcctgagtttatggtgaatttcggcatccgtccggagatgattccggttttcggagagatggaacaccattttcaggagtatgttcatggagaaaaccagaaaatttatctgacgaattatatgcacgacgtccatatcattccggaggatatgaatgaggtaaaacgggcggttgaaaaacagcaccagtgggtgaagcagcttcagctggagatcgaagaaaaagatttatcgattcgcaagcagattgagctgaaacgcctgacggacaatcacgtgacgaatctggaagtaatgatcggcaatctgcgccaggataacgagaacatggctcagaccatagcagtcttaaaccgccacgaagcgattgttttcaaggtcaaaagaaagctgggagagaaatttaatcagaagttcccgaagggaaccagaaagcggaagatcctgggatacgtgaagaatacgttttgccatccggttgcttccttccgtttatatacgaccccggaaggcagaaacttaatcgaaggcgatatgaagattggagagggctaccggatccacggaaagcttaagttccgggaagagaaggagccgatggtctccatcgtcattccggtctacaaccagatcgactacacgtacgtctgtctggcttccattttggaacataccacggatgttgcgtatgaagtaattatagcggacgacgtttctaccgatgccaccatggaactggcgaaattcgtggaacacgtgacgatctgcagaaatgagacgaatcagggatttttacgcaactgcaaccaggcggctaaggcggcccggggcaaatatgtgatgttcttaaataacgatacgcaggtgacaccgggctggcttaagagtctggtggatttgattgagcgtgatccgtccatcggcatggtgggctccaaactggtctatcctgacggcaggcttcaggaagcgggcggtatcatctggagcgacggctccggctggaactatggccggctggacgatccggataaaccggaatataactatgtgaaggatgtggactatatctcgggcgccgcgatcctgctgtcgaatgcgctctggaagcaaatcggtggtttcgatgagcggtttgccccggcatactgcgaagactcggatctggccttcgaggtgagaaaggccggctaccgggtggtataccagccgctctctaaggtaatccattttgagggtatttccaatggaaccgatgtgaatggaagcggtctgaagcggtatcaggtggagaattcggagaaactgaaggaaaaatgggcggaagagttcaaaaagcagtgtgtgaataatggcaatcccgacccatttcgggcgcgtgagcggagccagggcaagtatattattcttgtgatcgatcactatgtcccaacgtatgacagggatgccgggtccaaaacaaccttccagtacttgaagatgttcctggaaaaggggtatgtggtcaagttcctgggggataatttccttcatgaagagccgtattccacgacgctgatgcagatgggaatcgagatcctttatggccgcgactatcaggtgaaaatctgggactggctgaaggagcatggcgatgacattactgccgcctatttaaacagacctcatattgcggaaaaatacgtggactttatagaggaacacaccaatatcaagatgatttactatggtcatgatctccatttcctgagagagggccgtgaataccagctgaccggggacgaaaagaagcgggatgcgtcggaatactggaaagccatcgaattccgcatcatgcggaaggcggcggtatcgtattatccgtcctatgtggagcgcgatgcgatccatatgatcgatcccacaatccgggtaaaggcaattgtggcctatgtattcgagaaattcttagagtcggttccgaacgactttgaaaagagggaaggtctgttgttcgtaggcggctttgcccatccgccgaatgcggatgcggttctctggtttgcgcgagagatatatcctaaaatccgtgaaaaactggaggttcccttctatatcgtcggatcgaaggtgacagaggagattcaggccctggagcagccgggaaacggtatcatcgtaaagggcttcgtctctgaagaagaactctccgagctgtatcgtacctgccggatcgtggtagttcccctgcgctacggcgccggagtcaaaggcaaggtcatcgaggcgctgtataacggtgcgcctgtcgtgacaacctccatcggtgcggaagggatcgcggaagccgaatcggtgatgtgcattaaggacgctccggaagagtttgccgaagagacggttcggctctaccagaatccggaggcactccgggagctgagccggaaaacacagaattacatccgccgatattacagcgtggatgcggcgtggagtgtggttgaggaagactttacgaaggaaaccgtgaaacgatagaagttaagggagttcctcgaaatggaggagacgctgaatcaggcccgcccggcaaagggggcctgattcttttatctgcagttcgcaatattatgacacataatctctccagtggtgtaccggctgccagccaagaagcgcttttgctttggcgttggaatagagtgtttcgtaaccagccagatcgcctctgatgtctgtaatatccgggaatacctcctgaatcaaatcacggctctttatgtccatacagttgtcatccgccgccagattcatgatatcgcagcctaaaccgtctctttctacagccaggcggcatgcggaggcgatatctcttgcgtctatataattccagacattcagaaccctcttatggggatcatgaatccagtctttgaagttttcatacatcggttcggtgatgatgttgcccagacggaatgtgataatctgcatacggtttcgtctgtggatcccttcggccactttttcggccgcgatctttccgataccataggagtcctcagcaagcgccggatgttcttcatcaacgggaaaatactgagggcggagattattttttgagaaacagaacccgtacgcactttcacttgatgcgatgacggcttttttaatccctaaattgtccgctgcctccagaatatgataagaggccagaatattattcccaaaggtaacttcactcgtatagatgccgggtcttgggattgccgcgaggtgaacgacacccatggcgccggacagagccgaatacacctcacctgcatttgtcagatcgacaatcagattctcctgtgcagccgattcttttgggacagctctgtcgatccctacgacatgataaccatgctctgcaaaatgtcttgcaacatggggaccaagtagtcctgccgtaccggttatgatgatttttttcttactcatttacagcttcagcctcctttttacgtattcaatgctttccagatactctttttcagaatgcagatgttctataatcatgggcatatccggattgtatctggctgcaagctctgcatatttttccagatttattataccgccgccgcactccacttcccggtacatcatcgtgaaatcctgttcgagcagaacgtccttaatatggcagctctttatgtaacggccaagtttttcaaagacttcctccatgaattcctcgttgaagaagtaccggtaaggcgtggtgatccagttgaagatatccatatgaacggcaaaacggtctcttccgacgtcttcaatgagatgcagatactcatcaggactgatcgggtacatccatggcatcggctctatggtatagtaagtgtgtttcggagccgcctcgtcgatgatggtctgaatgctttttactgtttttttccaggtctcttttgtgaaattatctttataagccccatcccagcgttcccccattgagcccgctacgttgacggcacagtttgcaccaatggaatcggccagccgaagctgtcccacagcgtattctatggcatccgttcttacgtcttcgaatggtgataccgggtttcgccacaccccgacttctgcaatcagcagatcgtgatctctggcggcttttacatagctttggacgaggtcttccccctgtctgtaattgattggaaaatttacacacctgcagccggcagaggcatttctctgtgcccattccagaggtgtggcgtgttccagtgctgctgataagcctattcgtatcatctgatccggcctccccctgattactttttatagctttcgagaagttccacaatacactttaagtctttttcgccgttcatatagttatattcgccggatccatccccgtatacgccatgctgttccagacttaaaccgaacgcctcgcaccgggcgattgcctctttcgagtcatttacctgaaaggccacgtgatggatgccttctcctttttcattcagataatttctccatgtggacggcgcttcgttaggctgaatcagttcaagctggagtcccggtcctacgtcgaagaatgccatgaggcagctcgcttcgggagccggctggcctttgtagactgtcccggttacggcataatcgccaaccggctgagtcggaggtacttctacccctaagaactgcgcccatttttcttttgcagcctcaatatcctttacaataaatcctacctgtgcaactaagtttgttcctactactccactcatgattggttctcctttaatttttataatatgtttcattgattccttttaagtgccagggtgtctgaaaattttcctacagctctcccacgaaaagaccgggctctatcggttttggtatctcacagctggtagccatcttacagacgcagtgctcatttgcagccgttatgattccatctatgacttctgtaatatgtcttgccagctccgcactggctctgttcggccgtttatgttcaatcgcatatgccaggtcgagtacgccgagcccgcgggaataattgctgactctgtgatagagttcaggcagctcatacatctttgcttcacgctgccggtattcttcgttttcctgaaaaaccgtgtcgagcacctgctctttgcggtaaacggaggggactcctccgccgaagttcggatctgggtagcttattgtgccgtcggttccatagatttcaaatttcggaagaccagactgccagatatcgaaactcatgttcatactcacaataacacctgatttaagattcagcaccgcactgtagtgcgttggaatttcgacgtcaagatacgttccaaactgtgctttattgagaattaaacgtctgtcaaaccctttgccgcagaagcccgatacagagtcaaccgggcccagcatagagacgatggccgaaaggtaatagcccgccatatcgtaaagcggacctcctcctgcctcatagaaaggggctgggcagggatgccacatctccacgccgtgtgacatcatattggctgtgacatagagcggttttccgatgatgccgtcgcgaatatatttgttcatgctctgcagaccggatgacagaaacgtatccggagcgctgcctatcatcactcccttttcgccggcaagcgtaatcagttcatcggcttcgggcaggttcatggcaaatggcttttccgtaaataagtgtttgcctgccgaaagtacggagagattgatctgctgatgaaatcgcggcggtgttaaattgactgctatctcaatttcgtcatcggccagcagctcttctgtccggtatgcatgtttaataccgaatctttttgcagtttccccggcgcgattaagatctgcgtccgcgactgcgtgtatttcgagatcgtgataaatgttctgtatatcgggaatgtaggtattgcttatgctgccgcacccgatgatgcctattttataagttctcataatcttccttttccgcggtcagtgcggcatggcttcccctttatagttgataaacggtatttccagtttcgggtctgtctccccttctatcaccttatagatgccttctgcggattctgatgaagggatctgtgcgttctccgctcccataaccgtctgcattctgcccggatgcatcataaagattctcacgccgagttcggggcgttcatcatgcagatagttgcggattttctgtgtatacatgttcgccgcgtattttgagactgaatacgacagatagttataaccgccggaaccaagataagcagcctcggaagttatattaatgatgaccgggcaggaagacttgtagaggtaaggcataaaatacttaagaacaatcgccatgcctgttacattgacgtctaaagttttcctgaattttgcaacatcaaggtcaacaatctcatcaattttgtcgtattttgaaccgaacagtacacctgcattatttacgataaaatcaatctgcttgaatttatctgaaattctgtccgcagcatcacggatcgcggcctcgtctgtgatatccgcagctatgattgtcagcttatcgccgtattgggattttagaccggttatgttttctccggatgcatggagcacgatggcgatcatggtattgcctcttaaaagtcccagctttgtaagctcaaaccctaatcccatatcagctcctgttataagtcctgttgccatattacaccgcctttcagttatctgattctccaaatttgaatactttaaacagtacaagaataattgcgagtgatatcaaaagcagtatccagcccatcgcacaggcatagcccatcttaaagaagcggaaggcgttctgatataaatatagtgagtagaacagcgttgcattgccggggccgccttctgtgatgatgagtggttcggcaaaccactggaacacgcctatgatcaatgtcaccgtattataaagaatcgtggaacgcaaaagcggtatggtgacagatattgtctggcttataaaacccgccccatcaatttcagcggcttcataaagactcggatcaatatcctgtaagcccgcaagataaatgatgacggcatttcctatcgtccatatcatgtaaaagataaaagccggcttcgcccatgtactgtttgacagccacgccggtcccgatatgccgaaatatccaagtactgtgttaacaataccacctgactgaaacatccatatccataaaaaacaggctacgattgtcgggacaagtgtaggtataaagaatacaactctgaaaattcctgcgtgatgcaggtgtttattgtttaaaagaatggataccgctactgcgacaattgtggtaactggaacaccgaaaatcaacatataaacggtattgccaagtgctgctaagtaactcttatccttaaagagatcaatataattcttaaaaccgataaaaacaggtgctttaattactttatattcacaaaatgaataataaagcgaactcaaaataggataaagtgtaaatactaaaaagccgataatccatggcgatatgaaaagtaatgcattgcgaatgtctttttttctatagtccatgtgcccctccttaaccttttatgccggacatggtcacgccctgaataaaatacttctgcagtacaaaaaatagtatcagcacaggcataacgagcatggatcccaacgccagaagtaccgtccactgcggatcaagattagattttaacatggaagcagcaagcgacagcgtgtaaagtttttgatccgagagaaagatcagaggaccaatgtagtcattccagctcttcataaatgcaaaaacggcaactgttgcgagtacgggcttggcaagtggaagggtaagctgccagaatatcctgaattctccggcgccgtctattttggcggatgcggacagttcattcggtatcccgattaaaaactgcctgatcaggaaaatatagaatggggagccgaaaaagcaggtgacggtaagcggtaagaacgtaccgatccagccccacttgttaaacatgaggtacaggggaaccatggtgatctgaaagggcagaatcatggtgataatgaccagtataaataccttatcccgtccgggccacttaatgcgggaaaatccgtaggccaccagactgttagaaataagagagccgatcatattaaaaaatacaatgattaaagtattgtttaaatacaaaaaaaacggtattttttcgaaaactgctttaaaattggctaaactgaaactgtccggaagccatttaaacggtactctggccagttccatggtcgttttgaacgcgccgaagaacataaaggcaattggagcgataaaagcaactgagatgaggatcagtatcgcgtacattacaatttttcttacgattacgccgggagagtattcaatgctgtcgtattttcttgttttaacggaaatacctgtttttttttccatttttacactccttacttctgcggcagggcggttattcaccgcctgccgcttatcatctgcgcagctgttcaatctgcgcgtctgttaatttgcactgtcaagtgtggcctgcattctctcctgaagtgcctgcagggtagaagtaatgtcagcaccgttaaatactatttcctggcgcgttttctggaactggtcggcaagttctgttgaaacggaacacatggcaggaactccgttttccggattgttggcgatctcacgctccagagcatacattgcatcgccgttctttgtgaggctgacgccgtcaaaagcagcatctgaacagggaatggatctccactgtgcaaagttgtcttcctgaatcgcagggctgatacagaatttgataaagaatgccgcaagttctgcattctcagaaccttcgatgattgcaaacgggttagcgcctaaggtggttgcttttgcacgaccgtaatcaggtgcaggaaccgctgttacgccccactcaatagcatcaccgactgtcagtttgatggcattggccatccagttgccgcagaaatacatggctactttttccgtatagaaaggacacgaaggatcgaatacgcctccggccgaggtgccccattcctgaatcgtgggtgcatatttctcggaatatccttttatccattcaaagtattgaatcatcttatcttctgtaaggttaagcttattggttgcaggatcgtatacgtttgtgccgaatacgaacggaatgtggaaagcatcgccgctggtatcaccgccgtcgccaatccatggaatcagaccaagttgtttgaatccgcctttatcatccggtatggagagagcatcagcccaggcgtcaagttcttccagcgttgtcggaggtgcttccggatcaagaccagcctctcttgccagttttttgttatagtacagaagatgtacgtttgcatcctgcggtaccaggtacgtctttccgtctaccttaatgaggtcatcaagaccatcaaagaaactgtcgggatcaatgcctacttttgggagaaggtcatctactgccataaaggcgccctcaaccgcaaaagagtatacatcgatcggcgagtcggaaataattaagtcaggagcgttggtcccggaggccactgccgacatgagagccccatttttgataccggcgccttcaatctgctggcgggtgacatggataccgttatccgcgtacatttcattgaataagtcaacccggctttgatcccattcaccggaaccgcctgtaaatgctgaccagtagacgagttcaccggtaaggtccgtctcctctttttcgattccggcaaaagtaccggctgccgaattttcgctggccgttgtttcagcggcagcttctgtctttgcggcttctgtggctttcgctgcttctgtgcctgacggtgttgtacccgaactgcatgccgctaagtttgcggctgttattcctgcgagtgctaaggctgcgattttgcgtaacttcataatttttcctccctgatttataagtttttgtcttctttcacctggataaaggtaccgaatttttctttactgtcaaatactgtatagttgccgcctgtatattcgccatagtggcggaccggcatcccgttctcttcaaaatactggacaaccggttctctgtctctggtcataaatgcgatgtgatggatcccgtcgccatttttatccaggaattcccgccaggagctgggctcgctgtctggctccgtaatttccagtacaacctgtcctaaatcaaataccgccagttttgctctcgtatttgtgggctgccctttaaattttgtgtgtgcctcactctcaggcggaaccgtaaatacatccggaacatctacgccgaagagttcggcatatgcctttgcagtttcctcaatgttttttactaccagtgccacctgacagatggtctttccgtcaacaatccccataatcatagtcctcctttttgtctgtaaacattttcgtgtacaatataccctgcgatatgttactattaaggatagaaacattgaaacagtgtaaatatcgtgcggttcccttgttctttttatttattatgcggtattttgcagggcaaaaccactgaaatgttgcgcaaagtgctgtcatatattgctgtgcttgagtatggtgtggtgaatattacatgataatgcaaaggagaagaagatgcttcttggtgaatattatgagaatttgagctttaatcacggacttatggttaatatttcttatgccggcattccaacggattttccgctgcattggcatacgtttgtcgaaattatgataagctttgacgggagttttgagctgggactcggatatgatacctaccagatggaaaagcttgatgtggcagtctgctatcccggggttctccattccatcaaatcaaagggatgcgaaaaagagctgctgattgttcagttcccgtttgaactgataacgaatatgaaggaattcagctgcatgtcatacagacttacgcagatgcagatcatgcgcgcctgcgaatcagaagaacagatccttttgatgaaggatatttttatccatatgagagatgtattttattctgatcttccatttaaagaagtgattttatatacggatttattatcaatatttatacatttgggaaatcgctgtttcagtgagatgaaggaggctgctgcggatccctgcaatgcaaaaacgacggagctgatagcggaagcctgtttttttatcgccagaaactgtactgagcctctcgaactggagactgtggcaaagcatgtggggttctccaaatatcactttgcgcacacgtttaaaaagtatgtgaatatgacttttttagaatttctcacgactgagagaatcaaaaaagcagagatactgcttgccgacccgaacatatcaataaccgaaattgccatgcgtacagggtatacgaatctctctacttttaaccggactttcaagatcaacaagggctgtacgccaagggaattcagaaataaggttcatcggctcgactgaggaatcttccggggactggccgatctcacgcatctgttttttcaacatttttatttcaaaatccttaagatggtggattgttccccgcaatctatggtataatgtgatgcaaaatggattattatgcatatttttaaataacaggaggaaaacagacgatgcaggcagtattactggcaggcgggctgggaaccagacttcgttccgtggtggctgaccgtccaaagcccatggcgttaatcggggataagccatttatggagtatgtggtgcgggagttaaaaaaccatggaatcacggagattatatttgctgttggatataaaggctctatggtggaagaatattttggtgacggggcacgtctgggaatcagagtttcctatgcttacgaggaaactctgttaggtaccgcgggcgccattaagaatgcaggacgcctggtgacggacgaccgcttttttgtattgaatgcggataccttctaccagattccatacggccgtctggtgaagatgagccgggaaaagaatctggatatggcgcttgtgctgcgggaggtgcctgatgtgtcgcggtatggccgggctgttctggagggagagcgtctgaccgcgtttgatgagaagacagaagaggcctgtccggggacgattaacggcggggtctattacatgaaacgggccctgctggacgagatcccggagggaaaggtttccctggagcatgatatgattccgaagtggctttccagcggggataaggctctgggaggaatcgtgaacgacgggtatttcattgatatcggtgttccggaggactattaccgtttcattgacgatgtagagaaaggggcagtaactgtatgataatcagaggaagagcaccgcttcgggtcagttttgggggcggaggcacagatgtggcgccgttctgcgtagaacagggcggtgcaatcattggaagcacgatcaataagtacgcgtattgttccatcgttcccagaaatgacgaccagatcatcgtccattccctggattttgatatgacggtgaaatacaatacaaaggaaaactacgtgtatgatggccgcctggatctcgtaacggccgcattgaaggccatggatatcaaacaggggtgcgaagtctatctgcagtgtgacgcgcctccgggatcggggcttggaacgtcttccacggtcatggtagcgctcttaatcgccatggcaaaatggaaaggcgtttacttagatgggtatgccctggctgatctggcctaccaggtggaacgggaagatctaaagattgacggcggctatcaggatcagtatgcggctacttttggcgggtttaatttcatcgagttccatggacgcaataacgtggtggttaatccgctgcgcattaagaaagaaattatccatgaactgcagtataatttactgctgtgttatacggggaatattcacgtgtctgccaatattatcaaggatcaggtaaagaactacgaaaagaaggatgcgtttgatgccatgtgcgaggtaaaggccctggcttatgctttaaaggacgagctcttaaagggaaatttatacagctttggcaaactcctggattatggctggcagagcaagaagcgtatgagcagtaagattactacaccacagattaacgagctttatgatgaggcgctgagggccggcgctctcggaggaaagctgttgggtgccggaggcggcggatatcttctggtatactgtccttataatgtgcgccataaagtggcagccaggctggaggcggcgggcggtcagctgacggactggaatttcgaactccggggtgcccaggcgtgggtcacggatgaagaacggtggaattacgacagtgtcaaagtccatatgcccaacggagattacacatttaaattataatacagattacaggaagatgatgcatggacagagtgatatttttagaccgggatggaaccattaacgaagaagtggagtatttgcacaggccagaagatctaaggtttcttcccggagtcggagacgcgatcagacgcctgcgggagaatggattcgctgtcgtcgtggtgacgaatcaggccggagttgcaagaggctattataaggaagaggatgtaatcctgcttcatgagtatatgaatgaacggctaaaagagcagggcgcattcatcgaccacttcttctactgccctcatcacccggttcacggaattggaaaatataagacttcatgtcaatgccgcaagccggagaccggaatgtttctcatggcggagcagtattatcaggtggataagacacactcctatatggtcggcgataagctgttagatgtagaagccggccataattacgggataaaatccgtgctcgtgggaaccggatacggcgcggagactgcggcggagatgacggaggaagagcagaagaaggcgttcgaacattactctccggatctgctgtctgcagcggaatggatcatcggagaacagagaggctcattatgaggaggaacgataagatggaacctatgaagtatttagaggaactggtggagcggtatccggtacttgatgtggtaaaagacgatgtgctaagtgcctacaaactgttggagggctgctatgcacagggcggaaagctgctgattgccggaaacggcggaagctgtgccgactcggaacacattgtcggtgaactgatgaagggctttgtcaagcggagagcggtaccggattcctttgctgaaagcttaaaaagcgtcgatgcggtacggggaacagagctggctggtaaattgcagggcggccttcctgccatcgcattaaccggtcatgcgggcctctccaccgcttatttaaatgacgtggacggcgatctgatctttgcccagcagacatacggatatggaaagccgggcgatgtgctgatgggaatttctacttcaggcaatgcaaaaaatgtaatgtatgcactgactgttgcgaaggctcttggcatgaagaccattggactgaccggaaaagacggcggagcgcttaaaagagaagccgataccgcgattgtcgtgcctgagacggagacatttaagattcaggagctgcatcttcctgtttatcacgccctgtgcctgatgctggaagaacgctttttctaaatacgggacagattggagacagctatgacagaaaagcactttatggatggaatcggtaaatggaaggacgagatcattgccgcaggactgcttatggcatttgccttcttcataaacagaggaattgaaataaaggggctttatatggatgacctctatctctggtcctgttacggggagcagaccttcgggcagtttattttccctctggggagcacccggttccgattcctgtattatctggccgcatggctggagctggctgtaattggaaatcacatcggctggtttgtacccgttaatattatcttaaacggctgtatcgcctattcggtataccggtttggaaaacggttgtcgagaagttatctgatggggcttggatgcggcttcctatatctcttatccagaatgtcctactaccagatcggacaggtgtacgggctgatggagagtctggccctgtgggctgcgcttgggatactctactgtctgcttcgttacgtcgatgagaagggggacggcaggaagtatctgatccggtcgtgtgtgctttattttgctgtgtgttttatccatgagcgttatctggcactgcttccccttatatatctggcgcttctgtataaaaaagggaagaagaaggcaggctggtttcttcctgccggagtatttgccgtagttatggcgattcgtgtgctgacgaccggtggtgtggctccggcgggcacgggggggacgaatgtcgctgataccttcaatatcatgacttccctgcgctatgcggttgaccaggttctgtatatcttcggcgtgaatgccggacccggtcatttaagcggcgcaagctgggcagagtctccttcgtggattcatgtccagatcatagcggcagatctggcacttctggtgcttgtgatactggctgttatccggttgatccgggataaggaaggcagacggaaggcacttcgcgatatcagcctgtttctcgtatttatcgccctctgtatcggtgcttccagcgttaccatccgtgtggagaccagatggatctatgtatccatgacggccgcgtatctgctggccgcctgtttatatgggttgattacggcaaagccggaacacggcaaagtcgttgatatcaaacgggaagtgcgaaaggcagccgacaaaaaggcgggacgccagagtgcagttctctgcggcggactctttctggtctacatcataatcatggctccggtggagaattattaccggggacagtatcacaacctttatttctgggctgaccagcagcggtataattcgctggcggaagagacgtatgagaaatatggagatgatatcttcggcagaaagatctatattataggaaattcatatcagatgagtgattttacggcgagaaccttcttcaaggagtttgaccgtgacaggaaggcggagggaacggaagtttatttcatcgattcgatccatgatatcggcctgatcaccaataatatgctagtacttaaagaagacccggctcataacgcatttcaggatgtcactgattttgtccgtaatttaaagtgtgaggcggtctacggatattaccgggacggctggatggacgagagtgcagaggttcggattatgacgggatccagtggtgtgatcaaattagagatttattacccgggagcgttgacggggtcagagatctccacgatttccctgaatggagagccggtcagggatctggtcatcaatcagaataccatgaagctggagcttgaggcggaacctaatcagatcgccagtctccggtttgataataatttctatttaaaggatgcgggagagcaaagaggggagaagcgattctccatgattgtgaactttacggcagactaataactggaaaggaactctatgaaacgcagatactatttatccattcttccgctggccggtatcctgttctgtatgtggtatatccacattgcggcttccgatgtgatctattcagactatatcaggctggtaaacagttatcttccggatgtgtggaatccgggaaaattctttgtgccggacgtacttacaaggattccggtaaattacctggcccgcatcatcaatgtggaatttttcggatttaataccatgtttgaccgggtgctcggtgttctggcgctgggcctgtcaggctttattctgggaaaatactgtcagttaaggaaggtaaggaccgtctggttcgtcatcctgatggcgctgatgttcagtctgaataaatgggagatgctgatcaatggaagcggctgggcgcattttctggccttcgccggattctattaccactatctcgtcatggacaggctgtggacgggggatgaaaggccgggagacagaaagcttctggtaatccttccatttgccatcacaatcctgacggccggtccgtactgtgccatctattctgtggcagtcatgatggcctatggatttatgacgattctggattacagaaaaacgaaactgtttgagaggacttaccttctctatgcgctgtgtacattagcggcgcttctgctttacatgtggagcaattcgcttacggtggaggaccatgcggctgcggccgaggtggggctgttcactcagcttactcagaccccgggattttttgtccgttttattctgatttctttttcatccatggtcgttggaatcgaggaggccattgccgcatttaagggaaatatcgtcccgtttgcagttctgggacttcttgtgatagcggcttacttatatgcactgtatttgaatttccggtaccgtctgtatgaaaagtcaatggtgccgcttatactgattgtatcggggggactgaaccatgttctgatattcctgtcacggtggatttttctggttgatgactatggcgccagctccagatacgccctgcagtttcaggcaggcatatttggcattatcctgacctttgcactgtgccgcaatgaaatggtgacgaacaaaaaagcgcgggaaaaataccgtcggttctctgctgtggccgtcgtcttctgcctgctgtttctggccggtaatgtgtatacgacgtaccatgaactgaagaaggcgccggatcggaaagaaaccttcgaaaaacgggcacagatggcactggactttgaagagatgacggatgacgaattgagagcggagtttgaataccggacaacccgtccggaaagcggcggccagatccgggacgcgctgaccatattaaaggacaacggctggggtgtctttcgggaccggaaataaacatgttactgaggtggtgaaacggatggaacggactcataaatctccccgcagaaggaagtcaggcggctctttgcagagcagagggctggttttgcttctgtgggtatgtgctttgggcgcgattgcatattccgcggaccaggtgttcgtaaaaggaatcctgtcctggcacaggcagcagaaagaatattacaatatgatggcagaagtgattgctctcttctgtgtttttactgtcctgtatggactcataagaagccggattttaaaggcggccgggaccattttagttctgtccgtctttttctgggggcatatggtgtttcttccggtggtgacggcaggcatctacctgatctacctgatcctgttgggagaatttttttgcagagatattttaaagctgaaggagtccgatggaactgctgtttattttctgggcggctctcttcttgtaattctgatcttctgtctgatgtcggctgtgggaatcggcgctatcggagatttacagatttttgtcatagccagcggtatccttctgattctccggctgtgtatgcggcgtgggaaagaagatagaggtttgtcggcatggtgcagccggaaggccgggcaaaagagggaaaacagtccctggctgacggcgctctgtattgcgtttatcgtgaccatgttctgcattcaggccgggcgtatgaatattgctctcgattttgacagtctctggtatggcgtccgatcccggtatgtgcttgataacgggaatgggatttatgaaaatatggggacgatcggaatcgtctatacgtattcaaagggctgggaagtgatgacgcttccccttgccaatctgccctcatacagcttcctgcttgcttttaatctgtggctgacggcgggcgtcatctttatggcttaccaggctgcccgtttctatatgggaaaaggccactcgaccgtgtttgctgctcttttagccggtgtgccgggaatcatgaatatggcgattaccaccaagacagatattgctacgcttctcttccaggaaatcatgattttttatcttcttaagtatttgaaggagggcagaagggagtggagatatctggcatacggattcgcctctttctttctgacatggacactgaagccgacggctctcgtattttccacagccatccttggtatgagcctgctgtttctggtgtggaaacgcctgcttccgtcgggaggcgggaaaggaaaagcgggacaggcaggtggaaaagggaatgtgggacagacgggcgcgctggggctttttctgttatcacttctggcgcttgcaggaatctgggccagaactgtaatgatcacaggactgccggtgacctcggtgttctcctccattcttacgaagctgggactggagatgaaatatcccttcaatgtcaataaaattccgaacagcggagcggagctgccttttggcgaacagcttgtgaattttatcaggcgggcgttcggattcctgctccggcctctgggcgtggatatggaccatgtgattcttgcctggggtggatttctgctctttattgtgctgcttttgtggatattcagtttgttttacagaaaaaatgtggaaaatgacagggagaggctgctttcgtcctggctgaacgtggtgtttattccctttctgatcgtctgcgtagtcagtctctatatgctggtccaggtggatgggaattactttatgctgctttacgtcctggctgcgctttatgtgatgcggctcgtagtccggatctcggacaaggcggttagaaacgggctatgcggtattctggttcctgtgatgtgtttctgcgctgtggtgtcctccctgacaaactggagctgggttgtgggattttcaccggtatcctggaagcatcacgggtattacgaccatcaggaggcgaagcaccaggaaatggttgaaaaaggaaacggacagatctgggatattctggcggaagaccccgaaaaccgtctgatcgcggtgggagatcatcccggagtactgggattcccctgcaatgcccagtcgtacgatgatattaccggttcctggggaaatgtggttctggtgaaaaccatggataatttcgtggagtttatggactatgcgaagacggattacgtttacacagaagccggatacatggaggaggagcagcggtgttacagcctcgttcgcacgctcattgaatatggcaagctgattcccatctgttatgaggaagggaatatgctggcgcgggtggatatcgatggagaatatacggaaaccagtcgggcggcattgacagaatttgacaaatgttatataaagaagaatgtggattaggcggaaaggttggagttggaaatgaagaaagaagttaaaataggaatcggactggtatttctggcgttttacgtgtttctgatcatgcagttcggcaaagtattcgtgtattatgatgacttcggatacttatcgctcagctatgggaatacggtgccggatgtgattggttccaactatacgttatcccagctgctttcatttatggggaaacattacttctattcgaatggaaggctgttttacttattcctgttcagctttttaaatatgacaggcggactggctgcggtccaggcctttatggcaaccagcgttctggcgattctggttctggtccattacgtggtcatgcgccacagtaagcctgcgggctggcgcccggtatttctggcggcttttatctgcctgctctacgggaccattggaattctgattcagcgtctgggaacgtactggtatgcggccagctttctgtatgtagtacctgcagtcacatttctggtcctggcagttctttattatgagacaatcggggaagaaccaaagacctggaaaaaggcggcctgcatcgtgctggcgttctttgccgcgttttctcaggaagagtggctggtggctgtgatcggttatatctgtatggtgattgcctggaagactttgaagaagtaccgtgtccgcgcttacgatttcggaacgctggtggcggctgtggccggagcgctcccgatcctgacatcaccggcggttaagatgcgtatggacaacaacagcgagttttccaatctgccgtttgttcagaaggtgctgaccaacttaagaaatttaatgaatctgtttttttcttctgataatcagaattatctggcagtgctgttgatggctctgatgtgcctgggagcctatatgatatggaagcgtatgaaatatactgtcttgaatatcgggtatctggccttctcagcggcggtcaccgtgtacctgtttctaaagttgaaccgccatgtcctggggccgggcggtcattcccaggtgatgatatgggtcctgtttctctatctccttgtgacggcggtgcaggtaatccgtattctgtatgacagaaaccagattttgatgggaatgatattcttatcagcgattctgacgctggcctgcctcgtggtggtgccggagcttccccagcgggtgctgcttccgtttatctatctgtcttacacgctgttcgggtacttattctgtctgattctgctggaacggaaaagtgccgtatgggggattgccggacttattatagtggcggctgtcagtattccaaacctgaagaatatttaccggggctacagcatcaactatgaagtgcttatgtacaacgatggagtgatcagggatgcggcggcacgaatccgtgatggcggggaggagataaagaaattaacgctttatcagaatccggatcgtttgtgcagctgcgagatggtttacgatgaaaattttaagtatatgatatactggatggatgagtattacgatcttccgtccgaagtggaacttgaatatgagccaatcactgatctgggtgcatggcggcaaacacactgatttaaaggagtataaactgtggagaaaaaattatcggtcgtcgtatcctgctataatgaggagctggcgctgcgccagttttatgcggagacggcgaaggtgctgaaaagcttaagctgggattacgaacttattttcgtcaatgacggaagccaggatggcagcatcgggatcttaaaggaactggcagctggggatgagaaggtgaaggtggtggatttttcccgtaatttcggccatgaagccgccatgattgcggggatggactacagcagcggtgacggtatcgtctgcatggacgcggatcttcagcatccgccggaatgcctgcctggaattatagcaaaactggatgaggggtatgatgtcatcaacatggtccgcacgaaaaatgagtccgcgggctggtttaagaactttgccggagccgcgttttaccgtctgataaatattctctccgatgtgaaattcgaacccaatgcatctgatttctttgcggtctcgaagaaggcggcaaaggtgctcaagacgaattaccgtgaaaaagtccggtttctccggggctatgtgcagaatatcggatttaagcggacaaccatcgaatacgaggccagaaaccgggtggcaggggaaagcaagtacagtattaagaagctgattacattctccatgaatacgatcatgtgcttttctaatctgcctctgaagctgggaatctatgccggaggtttcgcgggtgttctgggaattattatgatgatatatacaatctggagctgggcagaggttggaacgcccagtggttatgcgaccacgattgtgctgatctgcttcatgtttgcgattctcttccttatagtcggtattatcgggaattatattgcgattctgtttgcggaattaaaggacaggccgatttatattgtgggagagacgaagaactttacagatgatgaagaataacagggcatagtgctgacaaatcgttgtgtagaaaggctgacgggaaatggaatttctctgtcagcctttttgattctaacatacttctttaacggttgcaaccgccatttgaatttgctacaatgtgagaagtaatgcaggatcatgcagtatcaggacgccagccctgccgtacaggggatcgaaaattcaatctggggtaaagctgtagcagctggctgtgtgaataaaaatgtgagaagagcgaggatagttaagatgacgtgtgataaaacagatacaatgaattatgtggtctcttttttggaaaaactggtaaatactccgagccccagcggctttacggatgaagtgatggctctggtggaaaaggaagcggccggttttggtttccggtcccattacagcaggaaaggcggtctcatcatcgaggtgccgggaaatacggaggcggttctggggctttccgcccatgtggatacgctgggggctatggttcgttccatcagctctgaggggatgctgcgcatcgttccggtgggcggatttatgatggaaagcattgagggaatgtactgtaaagtgcataccagaacaggcaaagtgtataccggtacgattctgacgaaggaaccgtctgttcatacgtatgatgatgcaaaaaccctggagagaaaaccgaagaacatggaagttcgcctggatgagagagtgagaagtgaagacgatgtcaaagcgctggatatctccgccggtgattatatcagctttgatccgatgtttgtctatacagaaaacggatttatcaagtcacgccatctcgatgataaggcttccgtggctgtgctgatgggagttttaaaggagttgggggaatccggtgtaaagccggagcacacacttaagattgtaatcagcaattatgaggaagttggcttcggcgcaagctggattccggaagatatcgaggaatttatcgcggtagacatgggagcgctgggggatgatctggccggggatgaataccgggtatccatctgcgcgctggattcttccggaccatatgattacaagatgacaagccgtctgattgagattgcaaaggagcgggagatcgggtatgccgtggacattttcccgcattatggctctgatgtgggagcggctctgcgcggcggtcacaatatccgcggcgcactgattggacagggggtacatgcgtcacatggaacggagcggacgcacgtggaagggctggagcagacacttcggttgattgagggatatcttggactgaagtagtacagtcttgttcaattgttgcgttattcatgcagtgctgtaccaggatgacagacagggaggcagaatggagacagttaaattaaccagagagcaggcaagacgtttcttgctgcggagacatggccttttgggcggataccagtttgaaggaaaacggggaatcctggagtttgtaaaacaggtgggctgcatccaattcgatccggttaacgtatgcgggaggagtccggagctggtgctgttgtcccgggtaaagggctttacgaagcagatgcttcatgaacttctgtatcaggacaggcagctgattgattacttcgataagaacctttccatttttgccacggaagactggccttattttgaatgctatcgggaacagcaccggcagtgggagcggagccatgccgatatcgagacggtaagtgaacaggtgaaagggattatcgcagagcggggagcggtctgttccgctgacttagacatgccgggaaaggtacactggtactggagtgatacaaagctgtccagggcggcgctggagcatttatattttaccggtgacctggcggttcatcacaagaaggggacggtaaaatattacgatctgatcagccgctgtgtcccggaggagcttttaatgcaaaaagatccgctgccggatgaacgggaacatcagaaatggcatgttctgcggagaatccgttccgtcggccttttatggaatcgaccgtcggatgcctggctgaacattttaaacttaaatgctgcaggacgccggtctgcttttgaaagcctattgaaagaaaatgtcatcgttcctgttttgatagaagggattacggaacctttctatatggcaagtgaagaccgggagctggcagatgagtgcggatcggggaaaaactggaaaaaaaggtgtgagtttctggccccgcttgataatctgctgtgggatagaaatttgattcgtatgatctttgatttcgattataaatgggagatttataccccggcggagaaacggaaatacggccattatgtactgcctgtattatatggcgaccgtctgatcggcagaatcgaagcgtcgtacgatcggaaggagcagcagctgaatgtgaaaaacatctggtatgagccgggagtcagaaggacggagggaatgcagcaggcattgagcgctgcagtgaaccggctggctgaatttaaccggggggcggaggcggaactctaataaatatcaatgctgtggagcgctgctggaaatctatttgcgattcaacgatatctatagtataatggattcatatttcaataccgttagttcctataatggcacttataagaagcgtatattcttataggtgccattttcatcagctctgattcattccgattcatgtatatttggaatttcccgaagatttcggtttattttttaatcattgataaacataagtgccattataggaaaatttcgaaagaagtgcgtttaaatcaaacgtaccgcgagaaaggagttcctaaaatgagtgataaagtatgtttcgacaagctgggaacagaggaaaagttaagtgttctctatgacgagatgagaaaaatgacgcagagacaggttcagatgatggaggacttagaatacatggggaagcagctcagaagggttgaaatcattcaggatgatacgattgcagacggtattactgccattgcagcgaatatcgcagacgtatccaaaaagatggacagttttattaacatggaaacggtcctgaatacaatcaaatccgatgtgaagatcataaaggaactttaacatctacagattgaagaagggccggctgactgccggcccgttccagatccttatgaaaggcttaacagctaaggctaagagttatttttcctgaaaaaaatgtcatacgtgaaggaacacaattgtaaataaaagacaattgcagttaaaatataggtactgacaaaccatgtccatgacaacggatgataaaaagcagggaccacgattataaagagaataataacgatagcgttgataagtctgctataccagaccggcattttgcgctgcattaatatttttatatatagcaggatggaaactgctattgggacagctatagataaaacatacaatggcatagcagtaaacgtaaactgtttacagactcgaaacgtgatatcggtgaaaacagttaatgcagctgcagccatgtttacagctgcataaaaaatcattgaacggtttttattatgattcatctttgatcccccttatgtaaagcgccttcagttattgaggtgttgtgaatttcggtaggattcccataattatagatctctaaagtataagaatctgctcctttttgttgacataatacaactgctttatggttgcggataaaatctcggaagtatgatatttctcaggcgctggtaccgtatatttagctggataaacatcggtttcatcggtgccgagtgcaggatccggggcagagtcaaatgtcactttttccctataaccttaaggatacgtacttttcaacttgttggaaagattcagtcgtgattgttgatgggactggataaatcttccttaaacacatactttcggatcgcccatgccacgccgtcctccgcattggacttcgtaatgtattttgcccgttcgcggatacagtccatggaattagccatggctacggtccagccgaattccggtgtaaacatggagatgtcgttgtcgctgtcaccgagtaccatgacgtcctccagggaaatgcctttcgcggcagcatagttcttcaatgcgctgcctttctgagctgcagtgttggtcagttcgatattattgggaaatgaggaagccgccgctaagtccggatagtccccaaacgcttgtttcatgcgaattaccagatcacagtccaagtcatttccacagattttgtagatgtctgtgggggcaggaatttcgcttaaatcccggatgaaggtcatgctgtccatacgctccctggcagcagcctggatctcatcgggtatttctccctgaaatggggcgcggccatttaaaaaaccgtaaaactccagaagctttttttcgggatcggcagtggagtagcggccccgggaagtcagaatatccatgggggccccaaactctccgaaaacgtggctgatatcttttaaattctggctgttcaaaggaagattagccatctgcgtcccattctggtcataaatgacggctccgctcaaacagatataaccgcaggaaatgccgcagctctctatcattcccttagcatcgtgaaggtcgcggccgctgcagattaaaaattccacgccatagtcggacaggcggtgaatcgcgtcgatattggcctgagaaatatttgtatatgggtcaagaagggtgccatccatgtcggaggcaatcagtcgaatgctcattggtacatgctcctttattggtaaattctgataataagattcctttccatagcttatactaaaaagagatattcgtcaatgaataaacttgactgtgacccgacgtcaccctgtatactccggttagcagagtaaatggttagctgagtataagcccggctaagtaaaaatcaggaggaaaaggaatgggtggttttaggtttgagcagtgcgggaatatagaaggactttatctcgttgagccgcaggtgtttgcagatgagagaggatataactttgaggcataccatgccggcagcttccgggaggcggggttggacatggtatttgtgcaggacaatttatccatgtctgcgaaagggacgctcagagggatgcattttcaaaaaaactatcagcagggaaaactggtctgtgtcgtgtgcggggaggtgtttgatgcagtggttgatatcagagaaggctccaggacgtatggccagtggttcggcaccgtactttccgcagaaaagaagaacatgctgtatgtaccggaaggctttgcacatggctttctggtgctatcggatactgctgttttttcttataagctgtccgagcattaccacccggaggatgaaagcggcattccgtggaatgatgaaaccgttggaatccggtggcccattcccgaggatatgacggtgctcacctcggaacgagacagctgccatccggcttttggcgagggaagcgctttgaaaccgaaaaggaaccggaaaacaatgggggcggcggcccatgagaatgtgatggacgaaacaggctctggccggatggaacaccagaaattctttcaaaataatgaatagggtagattgtttgaggcggtttatggtatactaggaacacttagtgaggtaagaaaccacgcatagaaagagtaaaatatcatgaagccacatacatttgcagtctgcgcataccgcgattctccatatttagaggcgtgcatccgttccctgaaggggcagagcgtgccgtcggatattattctctgtacttccacacccagcccctatattatggatatggcggacaagtacggcattcccgttcatgtgcgcgaaggaaagagcagtattatggatgactggaactttgcctaccatatggcagattccagtctcgtgacgattgcgcatcaggacgatctgtaccagaaggattatgggaagctgcttctggagtcttggaaacgatatcccgatatgacgctgtttacaggcgggtatacggtggtgaagggggatacgcttgttaaatttgagaaagtagaatttgtcaaacgattcctgcggctgccgctgcggctgcgctcactcagccacttgcgggccgtcaagagaagcgcgctgctgttcggaaattccatctgctgtccggcgtgtacgtacaacaaggaacttttgggggagccgctttttgactcgccgtatcactttgcactggactgggacacgctgtggaaactggcaggaagagacggccgcttcatctgcatcgaacggccggtcatgtattaccgggtccacgaggaggccacgacaaaggcctgcatcagagacaacagccgggcgcgggaggaagcggagatgtttgcgaagatatggccgaagcccgttgtgaagtttctcatgcatttttaccgaaaagcatatgaggaatatgaataaattgcagctgcacagccgtacggctgtcagctgcagaaaaggttcgaaacagtcatgataaaaagaaattggaggatagacagatgaaagttgtactgctggccggtggattaggaaccagaatcagtgaagagagtcatttaaagccgaagcccatgatcgagatcggaggcaggccgattttatggcatattatgaaatattattccgaattcggttttcatgattttgtgatatgcctcggatataaacagtatgtggtgaaggaattttttgcggactatttccttcacacatcggatgtgacctttgatcttgccaataataagatggaagttcataataactattctgagccatggaaggtgacactggtagatacaggcctgaatacgatgactggcggaagaatcaaacggattcagccgtatatcggcgatgagccgtttatgatgacgtacggcgacggcgtgtgtaccgtggatttgaatgctcttgtgaagttccacaaggagcatggaaagacagccaccatgacgacggtgaacatcgcacagatgaagggggttctggacatcagcgacgacaacgcggtccgttccttccgtgagaaggatgagaaggatgccagcctcatcaacggcggttttatggttctgaatccggagatcttctcgtatctggaggatgataccaccgtatttgagaaagaaccgctgcagcgtctggccgcagaagggcagctgatgagcttccatcacaccggattctggcagtgcatggatacgcagcgcgagatgcagaaactggaggccttatggcagacaggagcggcaccgtggaagatctgggaaaactgatgccggaaaaggaagaaggaatactgaggcaggagaattgatatgaaagaatggacaaaggaaatgcagcaggaattctgcgcattttataaaggaaaaaaagtactggtaacgggccataccggatttaaaggagcctggctcacgcgtatgcttacgaacgccggtgctgttgtaacgggatactctttagagccgccgacagaccccagcctgttttgcgtcgccggaattgaggatacgatggaatcggtgattggagatatccgggacctgcctcatctgatggaggtgtttgaacgtacacagccggaactggtatttcatttggcggcacagcccatcgtgcgggattcctataaagacccggtctatacgtatgagactaacgtgatgggtacggtccacgtgctggagtgtatccggaggaatccgtgtgtgaagtcatttttaaatgtgactacagacaaggtatatgaaaacagggagtgggaatacggctaccgggagtgcgatcccttagacggatttgatccttactccaacagcaaatcgtgttccgaactggtgacgcacagctatgcgaagtccttttttgcggacggccatacggctgtatccacatccagagcgggcaatgtaatcggcggcggtgattttgccaatgacaggattattcccgactgcatccgggcggcgacggccggcagagagatcgtggtcagaaatccttattctacacggccataccagctggtgctggaaccgctggcgatttatatggccatcgccatgaaacagtatgaagatttgaactatcagggatactataatgtgggcccggacgacagggactgtgtgacgacaggtgaactggcggatctcttcaccgatttctggggcggcggcatcacctgggtgaaccggtatgacggaggccctcatgaggcaaatttcctgaagctggactgttccaaaattaagaaaacctttggctggagaccgcgctatagcgtgaaggaggccgtggaaaaaacggtggaatggacaaaggcttatctggccggcgaagacatgctggctgtgatggacagacagataaaagaatttttttcataacaggaaagaaacgcgctccggcgtgggagtccggctcaacggactcttgattctatacagagaggaatgatacaatgtttgaaaataagacagagcaggaagcgaaaaagcagatcctggatatggtagaagcttactgcgatacctatcacaatcaaaagaagccgttcaaagagggagacaggatcccctatgcgtcccgtgtatatgacagcagtgagatggtgaatctggtagacagttccctggaattctggctgacttccggccggtatacggatgaatttgaaaaggaactggccggatatctgggcgtgaaatactgttccctggtaaattcgggttcctccgcgaatctcgttgcctttatgacgctgacgtccccgcttctcggcgaacggcgggtgaaacgcggcgatgaggtgatcaccgtagctgccggttttcctaccacagtgacaccgcttatccagtacggcgcggtgccggtattcgtggacgtgacgataccgcagtacaatatcgatgtgacgatgctggaggaggcgtattcggagaagacaaaagccgtgatgattgctcatacgctgggcaaccccttcgatctggcggccgtaaaagcattctgtgaccgccataatctgtggctggtggaggacaactgcgacgctttgggaaccagatataccattgacggcgaggagcggctgtccggtaccatcggcgatatcggtacctccagcttctatccgcctcaccatatgacgatgggagagggcggggctgtttatacgaataatccgatgctgaacaagattatccggtccttccgcgactggggcagggactgcgtctgcccatcgggaagggacaacatgtgcggtcaccgctttgacagacagtttggtgagcttccgctgggatacgatcacaaatacgtgtattcccattttggatataacttaaaggcaaccgacatgcaggcggccatcggctgtgcacagcttaagaagttcccgtccttcgtggaacgccgccgccataactttgacaggcttcgcgccgcgctttcagaggtggagggacagctgatcctgccggagccgtgtccgaattcaaaacccagctggttcggtttcctgattacctgccgggagggcgtagacaggaacggaattgtgcagtacgtggaatcacggggcgtgcagaccagaatgctgtttgcaggcaatttaactaagcatccgtgttttgatgaaatgcgtgcggcaaagtccggataccggattgtgggagagttaaagaacaccgaccggatcatggcggatacgttctggatcggagtatacccgggcatgacagatgaaatgactgattatatggccgcagcgattatagaagcagtaaagaaaaacagctagacgaaagaagcccggacgtggggattcgcttaagacgttcctggcatggggagaaggaaaccaaatggagaattacgatcttacaaaggtccatgaggcgaacctggctattttaaaggaaattgaccggatttgccggaaatacaggataaagtatgttctggatgcgggaacccttctgggggccgtgcgccacaagggctttatcccgtgggatgacgatgcggatgtggcattcacgaggccgaactacgatgcatttttaaaggtggtaaaaagagaactgcctgaaggcatgacgctggtggagccaaaggacctacggggcgggaaggcatttttcgatttcacggccaggattatctatgagaagagccagatgcatgaggatacggaagagatgcagtattacggaggcaggctgaatcacctttgggtggatttatttacgattgacgagcttccggacaacaagattgcttccacctggacgctgtttctgcacacagtgctttacggactggctatgggtcaccgctataagctggactttggaaagtatggtgcgatgggaagaatctgcgtgtggctcctttccactgttggcaggctgattcccatgagcgttattcgaaagcttcagcatatggcggcggtgaaggacagaaaaggtaagagccctctgcgctactacagcaattaccagccggattacttatatgtgacgcttcagaaggagtggtgtgaggaaacggtagatctgccgtttgaggatacaaagctcatggcgccaaagggctggcatgaggttctgacctggatttacggcgattacatgaccctgccgccggaagagaagcaggtgccctctcactccagtatgaaaataaaaatcatggactgattacttaatgtctactgagcgtatactgcgctggaaaatatttccaatcggacattatatcgaccgaattctacaatttttttagatacactaaagaaaaaaggagggattcggtcatgacgatatgcgaagcaaccagtaaaaggattgaacagttatgcagacagaagcgtctgacgggatattctctgacctttcaggcagggatgccgccatcaacctttaagagtattatgaatggaaagagcaagaaccccggaatctgcaatatcaaaaaaatcgccgatggctttggaatgaccatccgcgagttctttgattccgatttgttcaacgatctggaccaggacgattaattcgccctggtcttttcaggtttctttttattttcgtcaggttcaccgccttcgctgtggtccagatattcttttgcatctttaaagaaactgaagagtatcagcagtatgatgatcccgatggggaatgccgcaatgatggatacggtctgcagattcgccatcgagttctccgagaaaatgagcgcgatgggaaagagcatcagcaggatggcccagaacagcttcacgtgcttgtcaggctgggcgtcgggcggcagttccttataggaataggaagaagccaccatagtcagtgcatcgaaggacgtcgcgtaaaaggcgatcatggttacagccagaaggataaggccaagttttgccagtggaagtgtctcaaagacagccataatggtctgatacaaatctccggttgaggcatagatccccatgacgtccagatgtcccttggtctgcagcgccaggctgtaattgccgaggatgataaaggaagtaaaggttccggacagtccaaagaagtagcctccgagaacggtctgccggatggtgcgtcccttgctgatggttccgatgaagaatggcgtggccacacaccacaccatccagtaggcccagtagaagatggtccagttctgcgggaacgaggaggtgcgcagcgcatcggtccatgtggacatgccgataaaattctgcaccatattgccgacagccgtgattccggtctcgatggtataacgggcctctccgccgccgatcagcacgtagagcagcaggccgaagaagagccaggtacaggaggcggccagcttggcaatacccttcataccgaaatacacggtgatggtgtagatgacgcagatgatgacaagaatggcgattgtcagcatattggactccgggataccggtcacacggctgatcgccatggagagcagcggagtagccagggaaaatgtggtagccgttcctgccagaagtgcaaatacggcgatcagatcgatgatttttcctccgattccgtctacgtgtttaccaagaaccgggcggcaggcttcggaatacttctgtttcgtgcgcttctttacatggagcataaaaccgaaggccacggccagcaccatgtaaaaactccagggaatcggtccccagtggaagaggggataggtggaagcccaatcctgaaaggcccccatatccgcgatgtgaggttcgttggcataaagcacccactcgcagagggagtagaagagaatgtcagccgcaagtcccgctgtaaacatcatggttccccatttaaaattggaatactgcggtttttctaaatttcccagccggatctttccgtatctggaaaatgccatatagagggaacagagaaagacgccgaggccaatcagcagatagtagcttccgaactcattgccaaggaagaaacggacctgtgacagcatgtcggttgatttctgagggaacaccataaataaaaggcatagtatgataatacagacaaatgggattatggtcgtaacccagtctaatttcttaatcaggtattttttctcgtcctggtccatgatagtacctcctaaatgttcaaaaaagtaaaaacaaaaatgatattgaacatgataccatggttatccagaaaatgcaagaattaattgtgaagattttctgacttttttccaaaaccactacaaaaatgaagcgccatccgatataatagcctcgtgcagaaaaaaggaggacggaatttgaccatgaagaaaaaagtgttaattatatgcggaattgcggcgatgctgctggctggctgtaccaagagcaatattgttacaggaggaccagcggagccggtatttgaaacccaggaggggattgtactggattggggacagatcggagacgatctggatgaacagtatctgaataatgaggattatccgaaggcggtaagcatcaattacagcgtggacccggataagaagacgatcgatttaacgctgatgatgaacgcgggagcgaccacggaggaagcggtggactttgcaaacgccgttgtgagaacgatcaatgacgaggcggctgttcaggacttttccatcgagacatccacagaagattcctatggcgggttctttcaggactatacgctgaatctcatcgtaatgcctgacggcatgatgacagacaagtctgtatggctggtgaatatgacgattccagcagggtctaatgaggccattgtgccggcagagggcgcgaaggtcatggaaccgacatcagcggaagatgagatgggggaagacatggacggtgatatggaagacgacggcgcggaggaaggccaggaataattcctgataccgtgtggtatgaatcagaaccgggaatcagtcaatttatcatgtagatatcatgcagcaaaaaggtgcagcagcgaaattttcattcgcgtctgcaccttttcccatcctaggatactgccaggccgctgtggtaagagtagttgcccagttccttcaacagcgttccatggtcctgatgagagagcggagtggctgatatcagctcttcattaaataagtaaaatacatcgctgcatttgcgcatggactggtggaaaaggtccggaaacgatgcctgggaagccagacgcttatcccatggattacaccaggtctcatgatccaggttcatggcttttaccggatccggcggtatgtccgtgaccagcttcttagaggcgatgggattcttgagaaagagattttccaccaccgcaatgctgttcctcttgcggcttctgggatcggccagggtacggcagccgatgcgcatggcaagaatggagcgggacaccatccggggcgtcacgcgaaaattattccggtagttgatcggatagtaggcttcgttgatgcaggaggcgagaaaaccggagataaactgcgtctccagcccgtttaagcagatggtcgccgcctggttaaactgggacggcttcttctttttatatttcataagaagaagagcgtctatgtcattctccagcgtggcatgaagaccgtggtagtagtttcctgaattcttgatgtcgtactcaatccggccgtacacgtaaggatggcagatggaatcggcaatataatggcagaaataaccgcttaagtaggagatggcctgctcccgctgctgtttcgactcgatggtggccatgtggtttaaacatacggaaaagaaggtgctgacatggttctcatgcatataggagcctacgtttcgataatcgcggtggcgcaggatcggaatgttgtagaaaaacatatcggggccctgcaggcctaactgatagagccagcggtatttggagataatccgtcttagctggttatttggaagatcattgtatgctttgacgcctagaagataatgggtggtaaatccgggcatgtaatcacctcttgatggagtattttggggaacagtcagagagcatggatgaataaatccggccaaactgacaatcccgggcagtaccgccggaatgcagatgcgccggccgacggccctatacgcacattataccacatcccgcctctcatggtgtaatatatagtgtgatttttaatggaaattttattccttatttattttaaggaatagcctgcggatctatacggtcctgaggtatggagatgccgggcagcggaagaaatcacggaaaacagatgcccgctctgcaggattgtggtaatataacctttgaacgcagccggtctgtttgcgaacagggcaggaagctgcagaactgaaagaagaaaagggggagagaatccatgtttcatggaaaaatgaaggcgctgaccttcagctacgacgacggggtgacacaggaccggcggctggtggaactgtttgaccgttacggactaaaggcgacatttaacatcaattcagaactgctcggaaagccgggaacgctgtggagggagaatatgtgggtggatcacaataagatccggccggaggaggctgcggagctctatcggaatcacgaggttgccgtgcatacgctgacccatcctcatttgacggaactggaagaaccggagattatccgccaggtggaggaggaccggatcaatctggagcgcctcactggcaggccggttatgggcatggcctatcccggaggcggtgtcaacaacgatgagcgggtggcagaagtcatacggaagcacacggccatgaagtatgccaggactatcacatcctgctatcatttcgatctgcagcaggaccttctccggttccagccgtctgtttatcacatcgagtttgaccggatggctgagatgggagaagcatttttaaagctgcagccggataaaccgcagatttactatatctgggggcacagctacgaatttgattaccacgatacctggggggaatttgagaaattctgtcagatgatgagcggccgggatgatattttttacgggaccaaccatgaggtactcaacagcctgtaccatgcatagaacgttgtctctccgaataagtcttaataaaagcaatttggagcggcatcgatgatacatagaattcatgagcttgtctgggggccatggctgctggtcctgtttctggggattggcattatttacacggtgaagtccgggttcttccagatccggaggctgccgtactggtggaaaatgaccatcggaagcatacgggaggaggagctggaagaggacggcgccgtgacaaaattccagacggcctgtacggctctggctgctaccatcgggacaggaaacatcgtaggagtggcaacggcgctcactgccggaggtccgggagcgatcttctggatgtgggtgtccgccgccatcggaatgatgacaggctatgcggaaaccatgctcggaatccgctaccgctatcgggataagaagggaaaatgggtctgcggtcccatggtgtacctggaacgcggaatgcatatgccgtggctggggatggtgtacagcttcctctgtgtcatggtgtctctgggaatgggcagcatggtgcagtccaattccattgcggaaaccttccgttatacatttggtagccggccggaggtagtgggggtgattctgacgggaactgtatttctcgttatttttggcggaatcgggcggattgccatggtatccgaacggctggttcccatatctgcagggatttacatgcttttttccatggtggttatcatgtcatgctacgatcagatccccgccgtttttgccgcaattttccgcgatgcgctgaagccgggggcggctgtttccggcgctgcgggatacggaatctcaagaagccttcagtacgggatgtccagaggcgtattttccaacgaggcgggactgggcagcatggcggttctgcatggagcggctgaggagacgacgccggagcagcagggcatgtgggccatgtttgaggtgtttttcgacaccattctgatctgtacgatgactgccctggtaatcctctgtatgaccggcggcgatgcggcgggctccggatatgaaggagcggcactcacagcctactgtttttccaaacggcttggcggtgtgggggagtatctcgtgtcagcggcgatgatgctgttcgcatttgcaacgattatcgcctggtattatctgggacggcaggcatcggcctatctggccgaacggctgaaggagcacaaccgctgcctgcttctgtcccggattctgcggggcagggcgtatacattcctctatctgggggcagtatttttaggctgtgtggccaggctggaaacggtatgggagctgtccgatatctggaacggtctcatggcgctgcctaatattgcggctctgatctttttaatgaaggaagtgacttttccgaggggaaaaggagaagagatacggactgaaaaaacctgacaggctggaagccgaaaagaacctctccgctgcggagaggctctttttatatatttgtttgaaaaagggaggagagctgataataaattatcagctcgagtattatgaaaaaaatcttataagctatttatttgtttacaattaaagtatatccatgaatcatgaagaaaccatgttatttatgtaaaaggtttttgaatgaaatttaaacaaaatatgaacgaaagccgaaaaactccgatttactgtcttccgtcttgaaatgtcaggacagatttggtaaaatactttcagattgtacagaatacagagtgaatggtacagagaaaggaagaattaatcatatgaagaatccggttgtaacaataaccatggaaaacgacgatgtcatgaaagccgaactttatcctgaaattgctccgaacacagtaaataattttatcagtctggtaaaaaaaggtttttatgacggactgattttccacagagtcattaacggcttcatgattcagggcggctgtccggacggaaacggaatgggaggcccgggatactccattaagggggaattcagccagaacggattttccaacgcgtttaagcatacagagggtgtattgtccatggccagagcgatgagccccaactccgcaggttcccagttctttatcatgcataaggtttccccgcatctggatggcgcctatgcggcctttggcaagattattgagggaatggatgtcgtgaataagatcgccgatgtacgcaccgattataacgaccgcccgatgaaagagcagaaaatcaaatccatgacggtggagactttcggcacagagtatccggaaccggagaagtgctgattacagagtgtgtaatagaaagagacagaggataattgtatgacagagagacgaaccgtgttgatcggcggtactccgtatccagtcaccatatccagcgaacaggaggtcctgtcggccgcgtatgcggcaggcggggccatccttggtttatgggataaaaccagaagcggtcagagcctttctccggcggactatgtcgtggaatgtatggaagatgtcgatgaagagttcctggagcgggtagtgagaagacggtttcatcttccatggctgatcgcagagacaaagcggcttatcatccgggagtttacggtggaagacgccgcgcacatggcggcgggggaagcgggacccggtgatgatattttttgcagcagtgagaaactggccgcatatatcgacagccagtaccggttctttgaatacggaatctgggccctggaagaaaaaaagagtaaagccgtgatcggaaaggccgggctctttcagccggactggaaatttgatgatgcaaaggttttcgaaacggggactttccaggcagaaattctgccggcgctaaaaaaagaagataccccgctggaactggggtatcacatcttttcaccctggaggcggtccggttatgccaaagaggcctgcagggaaatattaaattacggtaccggccgtctggccagatgtatctgtgcggtcatagaggaagagaatacggcgtccatccgtctggccgaatcgcttggtttccgtcttactgctcaaagatataacggatcagctggattgctgtatctgtatgaggcgaattactcataacggtgagaaccggattatccagaatcaggcctgtcttttctccaaaggaggtatcttccagccggaggccgcagaacgattcctggccggtctctgcattggtgaccggatagaggtaatcctttacctgttcgtataaatccggaggaagggcttcttccagattgagaaatccatccatctctccgtaatgatcaatgacatccggtcggccgatcatgacgtctaaccccttgctggagatcatggcggtgagcttagccaattcggcataagagtattcgttcatggctgattcatcaaaggtaggtgacatggagtaatccacatcaatcttcgtattttcatcaagaccgataaaggcgcggaagccttcattgaaatactggtcaacagtcaaagcatcgctgtcgtagcggctgtttaagaccgcgcagctcagtgcggtgtcaaaccggttgttgtacatggcgcttccgatggaacccaccagaaataccgcgatgataaccccgatgataggaaatttgtaatattcccagatataccagaatttgtctttgaaagacatctctttcagcttggcggcttcctcatgcagccgttctttaaaggtaacattttcataaggtgtcatggatagtcaaacctctttcgtgaattagtcagtccggataccaccggtaccggttgagcggccggtaaaagacccgaaccaaagctcattgtataccacattataccacaacaccggcataataattgtgaaattttcatgaaataaagaagaacatttgctttttgggacaggattcgttataatactctgtaatgctactaaggaaagagaaggggtacgacttatgctgtctggtttttttaattatgataatcccgtctggcgttttatcgggaagtttggagatctgatcatactgaatgttctgtggtttgtatgcagtattcccatatttacaatcggagcgtcgacgaccgcggtctattacgtaacgttaaagcttgcaaggaatgatgacgggtatacgatccggtcctttttcaaatcctttaaggagaactttaagcaggcgaccattatctggctgatcctgctggccgtaggacttattctggggtttgacatgctgttctttacaagaggcggcttcaacctgtcgcagcagtttaagactgtcatggtgacgatttttcttgcgatgtccattatatatctggcgattatgacttatatattcccgcttcagtccagattttataacaccattaagagaacctttttcaatgcgtttttcatgtccatccgtcatttattccagacgatcgccatcatcgcaattgatgtggccgtggtagtggcgatgatgatgattccgcagatcatgatgttcggcgttctctttggatttccgcttctggcgtttattaactcctatatattatctccgatccttcagaagtacatgccgaaggaagaacgggaagacggtgagatgagaccgatttttgctgacgaggaagagaattcgaagactgcagggctggtaaaagaggaagatgccaaaacggaagagacgacagagcagtaattgatgacaggaacgattttatttattatagaagaaagcgttgtgattctgatcagaaaaagttcagaaaccacaacgctttttttagaatttggacatgggatggacacaaaaaagaggtatactgaacatcagtatggttggttttaaaaaatccgggaggtggcatatgacggaagaggagtatgttgtgtttatccagccttatgaggatgcgctgaagaacatacgcgtccgcgtcgaagtattaaatgacgattaccggcgcaaataccagaattatcccattcaccatgtgcaggacagaattaaaaagaaggaaagcattgaacagaagctggcgcgcagaggctgcgaatgcgatgtagagtcagccagggactgtctgaccgatatttcaggaatacgcgtgatctgctactttgtacgtgatatttatgcagtggtgtctctgctcaagaaacagaccgatatcgttgtgatcaaggagtgtgactatatcagccatcccaagcccaacggctacagaagctatcacatcgtgtttggcgtccccgtctatcacacggacggcatggagtattatcctgtggagattcagcttcgaaccatgtccatggacttgtgggcgagtatggagcaccgcatctgttataagggaagccggaatacggaagcgaaggcggcccgggaattccgggaatatgcagaatatttaaagaatatggaagaggagatggaggggtatttataaggagtatcccagtcttccgatgaacagtcatacccccgtcagcagtattctgctggcgggggtatgatgaataggataatatgagggaaagcgtgtgtttacttatcaatccggaagccggagtatgcggtcatgccgtgttcatgcatatccagtccatccagctgttcctgatcggttacccgcaaaccgatggtgagtttgattgcggtgaagatgataaaggccagtaccgccgtgtatacaagaacggatgcgactccgatgagctgtgcgataaacgtacagccctcgccaaatatgccggtaaggagcgtgccgacgagaccgcagcagccatggacgccgaccgcaccgaccggatcatcaacgcggaccaccttgtcaatgaattcgatggcaaatacaacgataaagccggcgatcacaccgattatgaccgcttcgtacggggttacgacgtcgcagccggcggtgatggcgacgagaccggccagagcaccgtttagagtcatggatacgtcgggttttccgtagcgggcccaggtgaaaagaagcgtgacaaatgtggaagctgcagccgccagattcgttgttatggcgatgtcgccgagattcagcgatgccgctgtagtggaaccgcagttgaatccaaaccagcagaaccaaaggatgaataccccgagggcaccgagcggaatgttgtgcccggggatggcgttaggcgtcccgtcgctgttgtattttccgagacgcggtccgacgatcttcgctccgacgaaggcgcatacgccgccgaccatatggacggccgttgaaccggcaaagtcatggaagcccagttcggacagccagccgccgccccagatccagtggccggtaacgggatagataaagatgctgatggctgccgagtagatgaggtaagaagagaatttcgtccgttccgccatggcgccggagacgatggtggcggaggtggcgcagaatacggtgtgaaagatcatgaatacgccgatgggaagtccgttcagcataccatccgcatccgccagggaataaggattgaagaaaccggatccgccgatgatgcccgcgatattttttccaaacatgagagggaatcccagaatgaagaaaaagagggaaccgagaacgaaatccatcatattcttcatacagatatttcccgcatttttcgcccgggtgaagcccgtttcgaccattgcaaatcccgcctgcatgaaataaaccagaaatgcgccgagcatggtccatataatattcattaataaggtcgtgttttccataatgttgctcctcctgaactgttttggtaaacgccgccagaatcctgaatggatgagaaaaggggataaccgcttacctgccggcaagcaattatcccctttgataattgatagaatggattctgtatggagtttgaatggatacggtcagccgtatcgtgccgtctgcgcagaacgcgccgttacagtgcccctcgtccgtgctctccggtgcggatccggatggcatcctgcacatcgtagacgaagatcttgccgtcgccgtagtttcccgtattgatctcatcgacgaccgcatcgatgatgggatctgccagttcctttggaatcacggtttccaccttaacctttggaagcaggtttacattgtacttggtaccgcggtacatctgtgtataccccttctggttgccgtagcccatgacattgctgatcatgataccgttgaccttgcagccttccagtatcgcctttaaattctccagcttttccggcctgatgatgatttccagttttttcatacagcatatcctcctttatcgtgttgacaacaaaaacgagggcagttccgcaaatggaacgccctcgttcgatattaaacattatacatttctgaacataaatgtcaaatacattttaaaacggaataattagaaaagtttgtgaaatattgacaacattatgcggtcacaaaacttagaaaagacttgtactttttcctctttcgtactatacttaatactgtatacaaaataacgaaaaagtacaatctgaagagattaagaaaatgcgaggtatttatgcctatgataagacatcttggacttaaggcctacgggaagattaatctggggctcgacgttcttgggaagagagaggatggataccatgaagtccgcatgattatgcagacggtgggactttatgataagattgatctttacttaaaagagacgccggggattaccgtagagacgaatttatactatcttccggtgaatgagaataacctggtgtacaaggcggcgaagcttctcatggacgagttccatatcaaccacggagttaccattcatttaaagaagtttattccggtatccgccgggatggcggggggcagcagcgatgccgcggccgtgctgttcggagtgaataagatgtttaatttagggctttccatggaagatttgatgaagcgcggtgtgaagatcggagcggatgttccgtactgtgtgatgcgcggaactgcgctctcagaggggattggagagattttaactccccttccgccggttccccagtgtcaggtgctgattgccaaaccggggatcagcgtgtccactaaatttgtgtatgagcatctggatgccgcatctctgcgcccggcggatcatccggatattgacggcatgatcgcggccattaaggaccgcgatatctatggcacggcttcccttctgggcaatgtgctggagacggttacaatcccggaatatcccgttatcgcggagattaaagaacgtttaaaatcactgggagctgtcaatgcattgatgagcggaagcggccccactgtttttggaatttttaccagcccgaaggcggcggaggaggcttacgaggagatgcgttacggcaggtccgccaacctggcaaaatctgtatatctgactaatttttataatacaaaggaggtttcccatgggaaatgatctgaaggtgaacatgaatgaatatctgccgctgcgcgacgtggtctttaatacgctgcgtcaggctatcttaaagggagaactggctccgggtgagcgcttaatggagatacagctggcggaacggctgggggtttccagaacaccgattcgcgaggccatccgaaagctggagctggaagggctggttctgatgataccgagaaagggagccgaggttgcgaaaatctccgagaagagtctgcgggatgtcctggaggttagacgttctctggaggaactggctattgagctggcctgtcagagaatgacggaagaagagattaacagtctggaacagacccaggaggaatttaagaaagcggtggccaggggagatgccatgaagatcgcggagaccgatgagacgtatcacgatgtcatctataaaggcaccggcaatgaccggctggtacagattctcaataatttgagggagcagatgtaccgttaccgtctggaatacatcaaggacgaggacaagcgtcagattctccttctcgaacatgacaagatcttaaaggccgtaaagatgcgtcatgtggaagaggcaaaggaagccatgagggaacatatcgataatcaggaaattaccgtttccagaaatatcaaagagcaggagggataaagaggcatgatgacgtttaaggaccggtatttagcaggtgaagtcgaatttgaggcgatcgacgattacgtggaagagtggaacggcagtgacgatccgaggacactggcccagtttttaggactgaatgaagaagaggaagacgtctggattgaggaaagtgatgaagcgcttcaggcccttcttgacagtaaaaaataaatgggaataaaatttataaaaaaagtataacctttattgacaaggtgacaacatgtcattataataagtgacaggttgtcactttttgcatttctgagaaggctggccggaaggaaaagtgagaacaaacagtaaggggtgaaaatatgccgacagaacgatttaacaaattgccggaagagaagaaaaaagcgatacgtgatgcggccatggaagagtgtatccgggttccttttgaaaaggtttccattaacaagattatccagaatgcgggaatatccaggggaagcttctatacttattttgaagataagcgtgatgtggtgaggtacatattcagtgataccgcggataagctgaaggatttctggacgacatcggtggtcagcaacggaggcgacttatggtctgcttcagaggagcttctggatcaggccattacatttgcccaaaaagggaagacattccagatgctgcagagctttgtgctctaccaggacttcgataaattgttttctgaggtccacggcggcaatcatatgggagaaaaaaaggggaatgagatactggcagcgctttacgaggtgacggatagagcgaatttccagaaaacggatatgaaatcattcactcttctcgtctccatgatcatggcatgcgtcatggaaagcataggctggtataaccggcatatggaaagtgaggaaaatattaagaaaattttccgggaaaaattagaaatactgcaacatggaatttgtaaacagtaactagaataatctgtgtgatgaagtgaggagttcagcatgagtaagaagaaggtaataacaattgcggtcagcgtggttctggtggctgctgcggcagctttaatcgtatccaatgttgccggaggaaagaaagaggagactgtagcggaggtgccgccggtggtatccgcagaacatccggagctccggtcgatcgtggtgaatacagagctgatcggtaccattgagcccgacagtattgtatatgtgacccccaaaggggctggagagattatcagcgtcaatgcccagaccggtgaccaggtgacggccggccagctcttatgcgagattgatacaaagcaggtggaggccgcaaggctgacgatggagaccgcccgtgtatcgtatgaggatgcgaagagcaatctggaccggtattcggttcttcacgcggcaggagatatggcggaagcggattttcagaagctggctgacaacgtagaactggcaaggcttcagtatgagagcgcgaaactgggatataatcttcagctggagagcagccgggttaccgctccgatttccggccgggtggagagctataacgtcaaggttcacgacatggtttcccagcagagccagatctgcgtgatcgcaggcgcaggagacggaaaggcagttaccttctatgcctcagagcgaattgtagaaggcttaaaggtgggcgacgcccttaccgttgtgaaaaacggtgtggatcacgcggcatcgattacagaagtcagttccatggttgatccacagagcgggctgtttaaggtaaaggcatctgttccggacggagccgccctggcgacgggaacctcagtaaagctgcaggtggtatcccagagggccgataacgttctcaccgtaccggttgacgcggtttactacgaaggcggagctccttatatctatacgtacggggacggtgttctccataagaatgcagttacagtcgggattgcggataacagctacatagaagtaaaagagggtatcaatgccggagaccaggttgtaaccacatggacaacagaattctacgacggttccaaagtcaccttaagtgagaatcagacatcagaagacgtgacaccagacgctcagactgaaacagaaggtcagacagagccggctgatgcgaatcagtaagggggcggaagaatgggaattacaaaaagtgttctgaaaagacccatcaccaccgtcctggcagtcctctgcctgctggtattcggtctatcctccgtgttttcctccaaaatggagctgacgccggagatgaatttcccgatgatgatgatcacagccgtgtacgcgggtgccagcccggatgacgtcaatgaactggtcacgaagccgatcgaggaatcggttggaaccctgtcaggtgttaagaatatccagtccatgtcccaggaaaatatctcgattgtcatgatggaatatgagtacggaaccgacatggataaggcttactctgatttaaagaagaagatggataatatcaccatgccggatgacgtggaggtacccagtatcttcgagttcaatatgaacgatatgccgagtatgacactctctgtcaatgatccctcggcagacaatttatacaattacgtgaacgatgagattgttcctgaatttgaaaagatctcttccgtggcaagtgtggatttaagcggcggtcaggaaggctacatcagcgtccgtctgattccggagaagatgaaccagtaccatctgaccatgaactccatcagccaggcgatcaagagtgcggacttcacgtatccggccggaagcacgggagtcggaaaacaggatttatcggtcagcacttccgttaaatttgacacggtggacagtttaaaaaggattccggttgtagcggggagcggaaagaccatatatctggaggacgtcgcggacatatccgagacgaccggaaaagatacgagtatcggccgttacaatggagaggataccatgtccttatccatcaacaaacagcagaagagcagtgcggtggacgtatcgaagtcggtaaaccgtactattgagacgctgaaggccgaacatccgcagctggaggtcattgtggtaaacgataccagcgaccagattacatcggcgttaaaatccgtgacgactaccatggtcatggccgttattatttccatgatcatcattttcctgttcttcggagatatcaaagcgtctctgatcgtcggaagctcgataccggtatccattctggcggcactgatcctgatgtcggttatgggattttcattaaacgttgtcaccatggggagtctcgttctcggcgtcggtatgatggtggataactccatcgttgttctggaaagctgtttccgctcccacaaggggcagggcttccgggaatatatggaagcggcgctggagggaaccggcaaggtaatccagtcgatcttcggcggaacggttaccacctgtgttgtatttatcccgctggcactcttaaagggcatgtcgggacagatgttcgcacccctcggatttacgattgtattctgtatggcagcgtctctgatttctgccatgacgatcgtacctctgtgctacagccggttccggccggtcgagaagaaaaattctccggcttccggtctggttcgcatgatgcagaacggctatcgaaagattattggaaggcttttaaacaaaagaaaaacagttatgggcgtatccatcctgctcctggtgttatccttcctgattgcgggaagacttggatttgcccttatgcctgacgtagatcagggaaccattgcagtaacggtggaagtacggccgggactgcagattgaagaagtcgataagattataagcagggtagagaagatcatcatggatgagcctgacagaaaatcctgcatggttacatacggaggcagcggcttaagccttggcggaagcagcgcttctctgaccgcatatttgaagagcgacagggagcttaccacgaaagaagttgtggataaatggaagaaagagatgcgtgatattccggactgcaacataaccgtggcagccagctccatgatgagtgccttcagcgcctccaacgatctgcaggttattttacagagctctcagttagatgaactgaaagaggcttccgacagtctggtgaatgagctgactcagtatccgggcctcatcaaggtacattccgatctggaaaatgccgcgccggttatcaaggttcacgtggatccgatcgaagctgcagcggaaggagttgcgccggcatctgtgggcgggcttctcaacaatatgttaagcggtgtaaaggcgatgaccatggacgtagacggtaacaatgtggacgttaaggtcgagtatccggacggtgaatacgatacgctggataaagtaaagggaatcacgattcctacacagaccggtggttctgtagcgcttacggatattgcggatattgtatatgcagacagcccggccggaataacgcgtaagaataagcagtaccaggtgacgatcacaggatcgtttaccgatgaagtgagtaccaaagagcagcaggcggcagtgttaaaagatattaatgagcaggtggtaagcaagtacttaaacggtacggttacgagagcacaaaacagcatagacgagtccatgtacgaggagttcggctctctgtttaaggccatcgccattgccattttcctggtatttgtagtgatggcggctcagtttgagtcaccgaagttctccctgatggttatgacgacgattccgttcagcctgatcggttcctttggactgctggcggccatggatgtggaaatttcaatgccgtctttactgggattcttaatgctgattggtacggttgtcaatgccggtatcctttatgtcgataccgtcaaccagtaccgttccacgatggataagaggacggcaatgattgaggccggagcgacgagattacgtcccatcctcatgactaccctgacgaccatcgtgtccatgattccgctggcgattggatacggcagcaatggagaactgatgcaggggcttgcccttgtcaatgtcggcggcctgacggcttccactgtcctttcgctcctgatgcttccggtttattactcaattatgagcggaaaagtagataccacaccgatgcctgattaaggaaaccatgtccggagggagcagcaggcgaactccggactaaaaaattggaataatgtgtctttgaacttatggcagttatatggtaagataaggatacaaaaagagcagatgattcagactgtaacatgaaatccatccggtacgaggttaggaggaccaattgatgaaaaaatggaaacagataagtgcctgctgtatggcagcagttctggcggctgccgttccgacagggactgcctgggccggcagcccggaatttgccagaagcgccgaggagtgggcaaagcttcgcgacaatgtcatggagtatgacgaactggcggggctgatacatgaatacaatgtgacggtacagaataatcagcgtgattttaacgagaaaaagaataaaacaagcgatgaaatcgcacaggactaccgtgacgcggccgacgcgatcaggagcagcatgtcaggagaggatgacgcgggatcgattctttccgatgcgatgtccgaagcccaggcgctgacgcttgagcagcaggctgatgacagcgtggaagacagtgagatatttaaaatgacgtatgatcagacggagaagacgctggtgtccaacgcccaggccaacatgatttcataccatcagaaggttctggatttggaattgaaacagaaaaacagagagcttctggcagcgacctatgattccgtggcgcttaagatgaacaatggcatggccacgcagatggatctgctgacagcccgggaaaacttacagaatgcagacgccgctattttaaccgcccagtccgatttagagaacacgcggcagaagctctgcgttatgctgggttggagatacgatgcttctccggagatcatggggataccgtccgctgacctgaaccggattacagccatggatccgtcggcagataaggaaaaggcgttggagaacaattatacgctccgcatcaaccggaaaaaactggccaactcttccagcaattctaaaaaagagagccttcagatgaccatagacgacaacattcagagaatcggcgcctcagtggattctgcatataagaatgtaattcaggcgcagaccgcctatcagcaggcgtcagtggctcttgacgcggcttcgaagaatatggaagcggctgagcggaagatgacgatcgggacgatcagccgtctggattatctgtcccagcagtatgcgtatctacaggcacagactgccatgaagaacgcggacatggacttattccaggctatggaatcgtatgactggaacgtaaatggtctggcaagtgccagcgcaggcatgtagccggcagacaggaaagcttacaccagccggaaggagtaaaacatgagaaaatggaagataatgctgtgcatggctctggccggtgcacttacatttacaggcccgtccgccgcgtgggcaaagctgtcggactacgatgcggagaccgcggccagactgcaggataacaatctggagtatgatgagctggaaaatctgatccgtgagtataacccggagatcagttatgcatacagccagcttgagttcaatgaggatgatactgcgtcgacggtcagggcagtaaggaacgatattgaggacaatgattataaagatctggtaaagacgttaaaacagcagaaaaagcagctggaggcaatgcctgattcagaagaaaaagcgaaggcgctgctggaactgaataccacgatcaaaggactggagggactgatttccgctccggcttccacgacaaaagccacggacaaacagctggaaaaggccaggaagcagctggatacaggtgtgaaatccgccttaaagggaacgcagactctgatgatttcctatgataatctccgcgcccaggtgcagacgctggaaaaggtggtggaactacagaaagaggcgctggaagccgcaaagcttcaggccggactcggcatggctacggacaccggcgttttacaggctcagagcgacttgctgtcctctcagtcccagctcgataatctccgcaatctggccggtaacctgcgcactcagctctgccttttgacgggctggaaggctgactctgtgccggagatcggttctgtccctgcggcagatccatctaaaattgcctccattgaccttacggctgacatacagaaagccataggaaacaatcagactctgatttcacagcgtcatgcgtcatcgaccaagtctactgcggcgattgataaccgtctgaaaaacatagacgtatcggagcagcagctgacggttgaaatgcagcgtttatatcaggtcatgcagcagaagaagatattaaatgatgcggcagaaaccgcgtatcagaaggcacttctcgccaaaggggcagcagagcgccagtatcagttaaacatgctgagtaagcttcagtaccttggagccgaggttcagtactatcaggcggaaggcgccagaaagtccgccgacacggcgcttcttcaggccatgcttgattacgactgggctgtccagggattcgtatctgttccccagtaaaacggaagcaattcattgagtgaatagagcacggcgaaacagcagtgtaacagacagggatgggatcagcggtcaggctgttcccgtccttctgttacactgctgtcttttttcagcagatcgagaaactttgagcgtatccgcacgtgaacctccggctgcctgatgagcagcgcctggtaatcagcggcatccagggactgtcttaaaacttctttggaggaatcgggaacgaccgcataggtcgaatcaacaaaacagagcggaggatagaggacacaccaccagttgtgtccttttccgctgcctatttccacccgtaccgcgtcataggtgccgcaggggaacaccatgtcgccgtaggtttttgtcgggaaatagcatctggtcacttccatatgtgcgggataatcgtatccctgggctttcatgtaatcttccgcctgctgttccaggctgtttttattggaaagaacgtattcttttgtatcgttcagggaggcattttctcccagtccctcatatattgaatcaaggagcagggttcttacgcgcagctttaactgctggtcttcatcggaatcgctgttggccaggacgtggaaccgcaggatttccggtgcgatccgggcggccatggcttcttcattccggcgtccggaagccatggtaagaagaaatgccagtaaaaggcaggttatgcataggaacaggtcacgtttatagttcatcaaagtacctcctgtctgtaatatctgtattgagaaaacgaaacaatctatcagttgtaattgtaaccatatgtgctataatataaacactgtaaaaaggaaattcctgcggagacagaatgccgcaggggatggaaagtatgaggagaaagcaaaatgaacaggaaaacagcggtcgtcttattcggcggccagtcatctgagcatgtggtgtcctgcatgtctgtggtcaacgtcatcaatcatatgaatagagaaaaatacgaccttcttctgatcggaattacagaagacgggcactggatcaaaacggaatcggcagaggatattgaatcgggcagatggagggaagggaagacgagtgcagtcatttccccggatgctacgaagcagtgcgtcatcctgacggaaggagaccgggcagagtttgtgaaagtggatgtcgtatttccggtgcttcacggcctgtttggggaggacggaaccgttcagggcctcttagagctggcgagaattccgtatgtaggctgcggtgtccttgcttccgctgtatccatggataaactgtatacaaaaattgttgttgacgatttgggtgtgcgtcaggccgcctacgttccggtgatgcggtctgatctgggtgacatggaggctgtggtcggcagagtcgaagcgaagtttacttaccccgtatttgtgaaaccgtccaatgccggttcgtccaagggagtggcccgcgcagacagcagagaggaactggaagctgcactttatgaggctgcaaagcatgacaggaagattctggtggaagagatgattaaggggcgggagatcgaatgcgccgtattcggaggcggcctggttcccgtggaggcatctggtgtgggtgagattctggctgccgctgaattttacgattttgatgccaaatactataattccgactccagaaccgttgtcaatccggagctcccgggagatgcggccaatacagtacgggaagcggcaaaggccatcttccgggccgtggacggctacggtcttgcccgtgtggatttctttgtaaaggatgacggaaccgtggtgtttaacgagatcaacacgctgccgggattcacggccatcagcatgtatcccatgctgtgggaagctgccggagtcagcaaggatcagctggttgaccgtttggttgatcatgcgtttgaccgctataagctttaaacgacggatcaaaacctgaggagagacagtatggcagacagaaattcacccataggggtatttgattccggtgtcggtggtctgactgtcgcgcgggagattatgaggcagatgccggaagagcggatcgtctatttcggtgatacggccagagttccgtacggcaataagtccggcaatacggtgatccgttttacgagacagattatccgctttctcctgacacaggatgtaaaggcgattgttatcgcgtgcaacactgcgacggcctatgcgctggaggcggtggagggagaactggatattcccatcatcggtgtaatccacgcaggcgccaggacggcgacccaggcgacgaaaaacggaaagatcgggatcatcggcacggagggaacgatacgaagcggcgtctatacaaaggtaatgatggaaatgcgccctgatatcgaggtaaccggaaagccctgtccgctcctggtaccgctggtggaggaggggcttctgcacgattccgttacggatgagatcgcctcccggtacttaagtgagctgaaaggcaaatatattgatacgctggttctgggctgtacccattatccgctcttacgttctacggtgggccgcctgatggggccggaggtgactctggtgaatccggcgtatgagacggctctggaactgaaatccgtccttacggaagcagatttgctgtgcagcggcccggcagaaggccaggagcagtatctgttttacgtaagcgatttggcggagaaatttaccagctttgcgacgtcgattcttcccggcgcggtgaaggaaaccaggcagatcaacatagaggagttttgatatgacaagagatgtactgattaccataagcggcattcagcttgcagaaggtgacagcaatgaggtcgagatgatcacagccggcgattattttcagaaaaacggcagccattatattttgtatgacgaggtcatggaaggccagaacgacattataagaaatacgataaaaatccgtccccaggggctggatatcataaagcggggatcttctaatgtccatatgacgtttgaaaaggataagaaaaacctttcctgttatgccacgcctttcggggagatgatgatcggaattaacacgaacgatatcatgattgccgaggacgaggacagtttaaaggtaagggtatcgtattctttggatattaattatcagcatgtgtcggaatgtaatattaatctggatattcactcgaagtctacggcgaatattcatttgtaaaaggtaacgccccatacctgccgggcggtccggggaagcgtgagggacgggggaacaaaccgtttcttgtttcttcggtggcaggaactaaagcagaacggcgggaaaaatgggcggatcgcgaaaactccgccgaactcctgaaggacttcgcctccgtgttcacttgaaagttggctttgaggccaactttcaccacccatttttcccaccgttctgcttaagttcctgcgaacctcagaaaatgaaacggtttcttcccccgtccctcccacttccccgaaccgcccggcaggtatggggctgtgtactggctgagtaagaaaagcaaaagcaaaaagctaaaaccttttctttaaataatcagtaaaatcagtaagtaactgttgtctgaatattactgtagattcacccaattctatttataaatgatataacctttgaatatacatctcttagtggagccaatacacagccccagtacctggagagaggcggagggaggaatgggaaacagtttccttttctgaggttcgcaggaacttaagtgggaagagacggaaaagagggggtgaaagctggcctcaaagccagctttcaagtgaacacggaggcgaagtccttcaggagttcggcggagttttcgcgatccccctcttttccgtctcttcccgctttagttcctgccaccgaagaaacaagaagctgtttcccattcctccctccgcctctctccaggtactggggcgtaaccctccatcaaaaaaccgccccatcagccctcagccaatgaagcggtctccaatttactttttgtcgttcttttcttttttcccttttttgaacctgtccataaatttcttcttcttcggcgcaaccggaactgctccgccgcgaatgctcttgatctcggttatgtagataccgctcaccacgaccttagcctccgtcttgactggaagaacatcgaataccttcgcatctgcaatcagcgtcatgaccttcggaccaatcttggccttaacaatcggcaccttcgcacgccgcatgtactttggcgtctgctcgtaaacgatctttggaagtccggcgtccttcagcttcatctttttcttgtcgatgaccagcatggatacggtctgtgctgccgcttccagagcctgctgctgttcaacctggcgtttttccagctttcttccgagaaaatagagaacagccagtaccacgactaagatgagaagaatcaccagtaatacgtttaaaaatgtgctcacggggaatacctccaatagttcattttgtaaataaagtctatctgtaatagtatagcattttattatggaaagtgcaagcaaaaaatgcttgacaccttgacaacgctatgatattatggaatgtgcactattgtggcatcatgtgccttgagggacatttatgcccaaaaacagaaccaatagaaagaaaacaggggtgaaacgtcaatggaaaaaagcagaatgcgtccggtcccagccggtaaaagcctgagaatgagcttctcgagacagaaagaagtccttgagatgcctaacctgatcgagattcagaagaattcctatcagtggttccttgatgagggattgaaggaagtcttcgaagatatctctccgatcgcagactttgcgggtcacttgagtctggaatttgttgactttacattatgtaaagacgacatcaagtataccatagaagaatgcaaggaaagagatgcgacttacgcggctcctttaaaagtcaaggtaaggctttgcaataaagataaagatgagattaatgaacatgagatcttcatgggtgatcttccgcttatgacagataccggttcctttgtgattaacggtgccgaacgtgttattgtcagccagttagtacgttccccaggtatctattatggtatcggacatgacaaggtaggtaaggaactctatacctgtacggtaattccaaaccgtggtgcgtggctggagtatgagactgactccaacgacattttctacgtacgtgtagacaggaccagaaaggtcccggttaccgtgctgatccgtgcccttggtttcggaacgaatgccgagatcatagagctgtttggcgaggagccaaagcttttagccagcttcggtaaggatacgtccgataattaccaggatggcttattagagttatataagaagatccgcccaggtgaacctttatctgttgatagtgcagaaagtttattaaacagtatgttctttgacccgagaagatatgatcttgccaaggtcggaagatataaatttaataagaagcttcatttcaagaaccgtatcgtgggccatgtgctctctgaggatgtggtggataccactaccggcgagatattagcgacggccggcacgactgtagacaagcagcttgccgtggatattcagaatgcagccgtaccttacgtatgggtggaaggcttagagcgcaggcagaaggtcttatccaacttaatggtggatttaggggcttacgtatccttcgatccgaaggacgcaggtgttacggagttagtattctatccggtccttgaaaaaattctggaagatgttggcacggaagatgaggaagtattaaagagcgcgattcacagaagcttaggcgaactcattccgaagcatgtcacaaaagaagatatcctggcatccatcaactacaatatgcatttagagcagcaggtggggaatgccgacgatatcgaccatttaggaaaccgtagaatccgtgcggtcggcgaactgctgcagaaccagtaccggatcggcctttccagaatggaacgtgtggttcgtgagagaatgacgacacaggatatggagggaatcactccccagtccttaatcaatattaaaccggtaactgcggctgtgaaggaattcttcggaagttcccagctgtcccagttcatggatcagaacaaccctctggctgagctgacccataagagacgtttatccgcattgggaccaggcggtctgtcaagagaccgtgccggattcgaggttcgagacgtacactacacccattacggacgtatgtgcccgattgagacccctgaaggtcctaacatcggtctgatcaactccctggctacgtatgcgagggttaaccagtacggatttgtggaagcgccttaccgtcttgtagacaagagtgacccgaataaccccatcgttaccgacgaggtcgtttatctgactgccgacgaagaagataacttcgtagtcgcacaggcgaacgaaccgctggatgaggaaggccactttattcataagaatatttccggacgtttccgtgaggagacatccgaattccagagaaagagcatcgatctgatggacgtttccccgaagatggtattctccgtggcgacagccatgattcctttcctggagaacgacgatgccaaccgtgcgttgatgggatccaacatgcagcgtcaggccgtaccgcttttgacaacggaagcgcctgtggtcggtaccggtatggaagccaaggcagccgttgactcgggtgtctgcgttgtggcgagaaatgccggcgtggtagagcgttccgcttccaacgagatcatcatcaagagagatgccgacggcggaagagacgtttaccatctgacaaaatttaagagaagcaaccagagcaactgttataatcagaagccgattgtatataagaataaccacgtggagaagggcgaggtcatcgcagacggcccgtccacacagaatggtgaaatcgcccttggtaagaacccgcttatcggattcatgacatgggaaggttataactacgaggatgccgttctgctcagtgaaagacttgttcaggaggacgtttatacctccgttcatattgaggaatacgaggcggaagcccgtgataccaagctgggaccggaagagatcacccgcgacgtcccaggtgtcggtgaagacgcgttaaaggatctggatgagagaggtatcatccgaatcggtgcggaggtccgtgccggcgatatcctggtcggaaaggtaactccgaagggagagaccgagctgacggccgaggagagactgcttcgtgcgatcttcggtgagaaggcaagagaagtccgtgatacttccttaaaggtaccgcacggcgcctacggtattatcgtggatgccaaggtatttacaagggagaacggcgacgagctgtctcctggcgtgaaccagacggtacgtatttacattgcccagaagagaaagatctccgttggtgataagatggccggccgtcacggaaacaagggtgttgtctcccgtgtgcttccggttgaggatatgccgttccttccgaatggccgcccgctggatatcgtactgaacccgttgggcgtaccttcccgtatgaatatcgggcaggtgctggagattcacttaagccttgcggccagagcccttggatttaatattgcgactcctgtattcgatggtgcaaacgagatcgatatcatggatacgctcgatgttgccaatgattacgttaacatgacctgggaagaattccaggataaatacaatgacaccctgaaaccggaagtgatcgaatatcttggagaacatctggaccacagagaactgtggaagggagttccgctcagccgcgacggtaaagtaaggcttcgcgacggacgtaccggcgaatatttcgacagcccggttacgatcggacacatgcattatctgaagctgcatcatctggttgacgataagattcatgcgcgttccacaggcccatactccctggttacccagcagcctctgggtggtaaagcccagttcggcggccagcgtttcggagagatggaggtttgggctctcgaggcgtatggcgcatcctacacactgcaggagatcatgacagtgaagtcggatgatgtggtaggccgtgtgaagacgtatgaagcgattatcaagggcgagaacatccctgaaccgggtattccggaatccttcaaggtactgttgaaagagcttcagtcactggcgctggatgtgcgcgtacttcgtgacgataataccgaagtacagattgcagagtccatggattatgaagagacagatttacgatccatcatcgagggcgacagaagattcagggaagaggagccgcttgcagattacggcttccagaagcaggaattccaggatgatgaactggtgagtgttgaagaagaggatgtagacggtatcgacgattcttacgaggatttcgatgacgccgatttagacgaatcagacgaagaatagttgtgtatgttaggaaggagaaccgctcatgcctgagaataatgaaacttatcacccaatgacgttcgacgctatcaaaattgggttagcgtctccggaaaagattcttgaatggtcccatggcgaggttaaaaagcctgagacgatcaactacagaaccttaaaaccggaaaaagacggtcttttctgcgagagaatcttcggaccgagtaaggactgggagtgtcactgcggtaaatacaaaaagatcagatacaaaggcgttatctgtgaccgatgcggtgtcgaagtcacaaaggccagtgttcgaagagaacgcatgggccatatcgcccttgccgctccggtttcccatatctggtattttaagggaatcccgagccgtatgggcctgattctcgatatctcaccgagaacccttgaaaaggtactgtactttgcatcctatatcgtgctggacgctgcggatacgggacttcagtataagcaggtattatctgagaaggaataccgcgaagaggttgataaatacggctacggcgcattccgtgtcggaatgggtgcagaggccatccttgagctgttgcaggccatcgatctggagaaggattccgaggaactgagaaaaggactgaaggatgcgaccggccagaagcgtgccagaattattaagagactggaagttgtagaggcattccgcaactccggcaacaaaccggaatggatgatcatgactgcaatcccggttatccctccggatatccgcccgatggtacagttggatggcggacgttttgccacctccgatttaaatgatttatacagaagaattatcaatagaaataaccgtcttgcccgccttctggagctgggcgcgccggatatcattgtccgcaatgagaagcgtatgcttcaggaagctgttgacgcgctgatcgataacggaagaagaggcagaccggttaccggaccgggaaaccgtgctcttaaatctctttctgatatgttaaagggtaagcagggacgtttccgtcagaacctgttaggaaagcgagttgactattccggacgttccgttattgttgtaggaccggaactgaagatttaccagtgtggtcttccgaaagagatggcgatcgagttattcaagccgtttgttatgaaggagctggttgccaacggcaccgctcacaatataaagaatgccaagaagatggttgagagacttcagaccgaggtctgggatgtgctggaagatgtaatcaaggagcacccggttatgttaaaccgtgcccccactctgcacaggcttggcatccaggcgttcgagccgattctggtggaaggtaaggcgatcaagctgcatccgctggtttgtactgcatttaacgccgatttcgatggcgaccagatggctgttcatctgcctttgtccgtagaagcacaggctgagtgccgcttcttactgctttcgccaaacaacttactgaaaccttccgacggtggtccggtggccgttccgtctcaggatatggttctcggtatctattacctgacccaggaaagacctggcgccaagggcgagggcatggtattccgcaatgtgaacgaggcgattcttgcgtatgagaacggagctgtaaccttacactccagaatcaaggcgagagtgaccaagaagatggcggatggcaccgtaaagaccggcattgttgagtccacggtaggccgtttcattttcaatgagatcgttcctcaggatcttggcttcgttgacagaagcattccgggcaacgagcttctgatggaggtggatttccacgttggaaagaagcagttaaagcagattctggaaaaagttatcaacgttcacggggcagttcagaccgctgagacgttagacgatattaaggcgatcggttacaagtattccacgagagcggcaatgaccgtttccatttccgatatgaccgtgccggagagcaagccgaagctgattgccgacgctcaggcgacagttgaccagattgccaagaacttcagacgtggccttatcacggaagaagagcgttataaagaggttattgatacctggaaggaaacggatgatcagctgactcacgatctgttaaccggtcttgacaagtacaacaacatctacatgatggcggactccggtgcccgaggttccgataagcagatcaaacagctggccggtatgcgtggacttatggccgatacaaccggtcataccattgaacttccgattaagtccaacttccgtgaaggtctggacgtactggagtactttatctctgcgcacggtgcgcgtaaaggactttccgatacggcgctgcgtacagccgactccggttatttaacgagacgtcttgtagacgtttcccaggacctgattatccgtgaggtagactgctgcgaaggcaagtcaattccgtttatggagattaaggcattcatggatggccaggagacgatcgaggggctggaggagagactgacaggcagatatattgctgaaaccatcacggatccggatacaggggaagtggttgtgaaggctaaccatatgtgtactccgaagcgtgcagctgcggttatgaaggtattacagaagctgggacgcgattctgtcaagatccgtaccgttctcacctgtaaatcccatctgggtgtctgtgcaaaatgttacggtgccaacatggctacgggacagccggtacaggtcggtgaggcagtcggtattattgccgctcagtccatcggtgaaccaggtacacagcttaccatgcgtacgttccataccggcggcgttgccggcggcgatatcacacagggtcttccccgtgtcgaggagctttttgaggcacgtaagccaaagggacttgcgattatcgcagagttcggcggcgtagccacgatcaaggatacgaagaagaaacgtgagattattattacagataatgagaccggcaattccaagacgtatctgattccttacggttccagaatcaagattcaggatggcgtctatttagaggccggcgacgagcttacagaaggtagtatcaacccgcatgatatcttaaagatcaagggcgtccgcgcggtacaggattacatgattcaggaagtacagcgtgtataccgtctgcagggtgttgagatcaatgataagcacgttgagatgatcgtaagacagatgcttaagaagatcaagatcgaggagagcggagacagcgatgtgcttccgggaacctccatggacgttcttgattacaatgatatgaatgaggcgcttcttgcagaaggcaaggaaccggcggaaggaaagcaggttatgctgggtattaccaaggcatccctggctaccgattccttcttatcagcggcctccttccaggagacgaccaaggttctgaccgaagccgcgatcaacggcaaggtagaccacttaatcggtttaaaggagaacgtcatcatcggtaaaccgattccggcaggtaccggaatgaagcgttaccgtactgttaagctgagtacggacggggaagagatgaatgaggatgagattatccttggtgatgatcttgtaattcccgtaacagaagagtatgcagaggctgaggaagttcttgatattgatgaaatcgatgaagaggacgtataaagaagtctgagaaataatcataagtcccggcggagagcgccggttgggtgtaagctcagccggcctgttcgccgggtttcttattaccgtgcgctgtggatgatgtacggtgggaaaggctgtattttatatgcaaatgtcagattttatgtaacaatgctaaaatccgatgaaataacaaaccggaggtgggttcatggcggatcttataatcggaatcattctgatcgctgctgttgctgcagtaatatggaagaagagacgggacaaaaagatgggaaagtcaggatgcggaggctgctgcggcagctgtgggatagagtgccatcagagaaacggcaaggaagatgaggcggtcaaacgccgcgacgcgaaatgacagctgcagaaatgaacgctatataaagcgagatgaaaaaacagagattgcgtcctgggtgaaaatgtgatatctttagtatacggtatcaaaaacagcagttctgctgatttgccgttgtccggtcatttcgacagatgtcccagaagaaaacagtaccatgataactgtatattgttggactttgcctgtttttcatgttatgatagggaaagaaacttgcctgtcactttgcagaagaggagatgatactatggcagatcaggaaacattagatgcgattgccgtcatgcttgatggactggaaaggcggctggatcagaaattcgaccagaagctggaagaaaagttagaagaaaaactggaagagaaattagaagaaaaattaaaaccgattcgcaccgatatattaacgctgtatggcgaggtgcatggactgaagaatgagatggccgatgtgcgggataatgtttacgaacttcggaaagatatggataccgttaagaaacagactgtgtacaattacgacagaattattgacaattacgcagccatacgggaactgcagacggtagtggaagggaaaatggataaaccgagactcgttcaatagaacggggatagaaaaacagagaaaaagaggcaaagtccgggccggatgtgcctctttttattttgtgtgcgcccggcggcgcacgtttctaaccggtgcaagtccggaatccgcccggtggtgggaaggatatagccgaaggcaagggtgtccatcgtgaggtggaatctgaaggaagctggatatggggaacatactaacccatgggcaaatctctggtctgacgaacagaaatcacatcaggctatacatgagggtaagactgcacaacaagtcaaagcccaataactacacagaatcatgtatggtaaatgtggcagatagatggagagaaagaaacgtgtggtacccggggaggtctgtgcggaatgtcctgaaagggataaccactatcgtgagatagtgctgaacgtacagaagtcagccgaggtcgtagtagtcgagagatgaaggaccgaatcaacaggagtctttagtacaaccgggaaaggaggaaagaacattgggtacagaaaacaaagatagctgctcacaaagagacagcgcggaacgtgaagggtatgtgagagcgcaccgttctttccgccggatatggaaggaaagagacagtgcacagccggaactcttagagaagatactgaataaggacaacttaaacagagcttttaagagagtaaaggcgaataagggagcgccgggaatcgacggaatgaccgtagaggaaacaggtgactgcctgagggaaaatcaaaaggaactgatagagagaatcaaaaggggaaaatacacccccgacccagtaagacgagtagagattcccaagccagagagaggagtgcgaaagttgggcattccaaccgtgaaagaccgtatcttccagcaagccataggacagcagttaatgccagtctatgaggcgctgttctcggagaacagctatgggtatcggccgggaagaagcgccagggacgccattttaaaggtaaaagagtatgcagaacagggatacacccatgccgttgcattggacctgtcgaaatactttgatactctgaaccaagaaatgctattaaatatcctgcgcagagatgtaaaggatgaaagggttatccaatggataaagagatacctaaagagtggtgtcatggaaaacggtgtagtcatggagacagaggaaggatcgccgcaaggaggaaatctatccccgctgctggcaaatgtctatctgaacgagttcgaccaggagtacgagaaacgaggagtggcttttgtacgttacgcagatgatatagtattgttagctaaaagtgagagagccgcaaagagacttctggaaacaagcacgaaatatctggaagggacgctgaaattgcaggtgaaccagaagaaaagccgtgtagtaagtgtatttgcaatccgaaattttaagttccttggcttcacattgggaaagaacggaaagggcatttatgtccgggttcatgggaagtcatggaagaaaatgaagtcaaaactgaaagaccttagttcccgaaggtctgttcagagcatacgcccatcgttagaaaagataaaggtgtatatgcggggctggctgaattattatggagtagcagatatgaagaaccgaatagagggactgaaccaatggctatatcacagaatccgaatgtgtatatggaaacaatggaagaaaccgaaaacgaaggtgaagaacctgctgaaaatgggagtgccgaaagaattggcatggaaggcagggaacagccgaagaggctattggtttaccacacaaacggtagcggtaaatatggcaatgacaaaagaaagactgataaacagtggctattatgatttagccacagcctatcagtccgtgcacgtcaactgttgaaaccgccgtgtaccgaacggtatgcacggtggtgtgagaggacgggagttaatcactccctcctactcgattttcactttctaaccccggcagagtcggttttccgacagggggagtgtggaatgctgagatcagtggtaaaacgatttttgaatgtttaaaaaattttccttgacagaaaaaagcaaagtgtatataattattaggcgtgcacaaacgcgtcatgtttttgtgcgcgcaaccaggctgaacgaaatacagcaaccacagacaatatcacaggaggtgaaaagaatgccaacatttaaccagttagttagaaagggaagacagacatccgtaaagaaatccacagctccggctctgcagaagggttacaactccttacagaagagagctactgatgtttccgctcctcagaagagaggtgtctgcacagcagttaagactgccacacctaagaagcctaactcagcactcagaaagatcgccagagtacgtctttctaacggtatcgaagtaacaagctacattccaggtgagggtcataacttacaggagcatagcgttgttttaatccgtggcggaagagtaaaggacttaccaggtaccagatatcatatcgtcagaggtacactggatactgccggcgtagccaacagaaagcaggctcgttccaaatacggtgctaagagaccgaaagacaaaaaataataattagaaccacatgattgaatttctagtgccggactttagatattgaacctgtaggttgcaggattatatataagagaaccgagcgcgaacgcaacttcaatgtttgtgagtacctaagatctaatgaagagctgtggaacctgcacaaagcaggctctggcggcgatattaaggagggaagtaacgtgccacgtaaaggacatactcagaagagagacgtattagcagacccgctttacaataacaaggttgttaccaagttaatcaacaacatcatgttagatggtaaaaagggcgttgctcagaagattgtatacggcgcattcggccgagtagaagaaaagacaggcaaacctgccgttgaagtattcgaagaagcgatgaacaacatcatgcctgtactggaagtaaaggcaaaacgtatcggtggtgccacctatcaggtgccgatcgaagttaaggctgagagaagacaggctttagcactcagatggatcactctgtactcccgtaagagaggcgagaagacccaggaagaaagactggctaatgagattatggatgctgccaacaacactggtgcttctgtaaagaagaaagaagacatgcacaagatggcagaggcaaacaaggcatttgctcattacagattctaataggaggaaaaagctttggctggaagagaatatccattggaaagaaccagaaatattggtattatggcccatatcgatgctggtaaaacaacattgacagagcgtatcctctattatactggtgtaaactataaaatcggtgatactcatgagggtactgctaccatggactggatggagcaggagcaggaaagaggtatcacaatcacttcagctgctacaacctgccactggactctgcaggaacactgcaaggtgaaaccaggcgctttagagcatcgtatcaatattatcgatactccaggccacgttgactttacagtagaggttgagcgttcccttcgtgtactggatggcgccgtaggcgtgttctgtgcaaagggtggagttgagccgcagtctgagaacgtatggcgtcaggcggatacctacaatgtaccgcgtatggcattcatcaacaagatggatatcatgggtgcgaacttctacggtgccgttgatcagatcagaaccagacttggcaaaaacgcaatctgtcttcagctgccgatcggcgcagaagatgagtttaaaggtattatcgatctgttcgagatgcaggcatatatctacaatgacgagaagggtgaggatattaccatcactgagatccctgaggatatgcaagtcgatgccgagctttatcataccgaattagtagagaaaatctgcgagcttgatgatgatctgatgatgcagtatttggaaggggaagagccttctgtagaggaactgaagaaagcactgagaaaagcgacatgtgaatgtacagcgattccggtatgctgcggtactgcctacagaaacaaaggtgttcagaagcttcttgatgcaatcgtagaatttatgcctgctccgaccgatatcccgtccatcaagggtgtggatatggatggcaatgaaatcgagagacattcttccgatgacgagccgttctcagcactggcatttaagattatgacagacccgtttgtgggtaagttagcattcttccgtgtatattccggaagtatgaattccggttcttacgttcttaatgccacgaagggcaagaaagagcgtgttggacgtatccttcagatgcatgccaacaagagacaggagttagataaggtttatgcaggagatattgctgctgctgtaggtttcaagaccacaacaactggcgatactatctgtgacgaccagcatccggttatcctggaatccatggaattcccggagcctgttatcgatatcgcaatcgagccaaagaccaaagctggtcagggcaagatgggcgaggcgcttgcaaagcttgcagaagaggatccgaccttcagagcgaagacaaaccaggagaccggtcaggttattatttccggtatgggcgagcttcatctggagatcattgtagaccgtctgctgcgtgagttcaacgtagaagctaacgtaggtgctcctcaggttgcttacaaggagacatttacaaaggctgttgacgtagacagcaagtatgcgaagcagtccggtggacgtggacagtacggacactgtaaggttcactttgagccgatggatgccaacgcagaagaactgtttaagtttgattcctccgttgtcggcggtgctattccgaaggaatatatcccggcagtcggtgaaggtattgaggaagcttccaagtgcggtattcttggcggattccctgtactgggtgttcatgcaaccgtatatgacggttcctaccatgaggtagactccagtgaaatggcattccacatcgccggttccatggcgttcaaggatgcgatgcacaaagcaggagctatcttacttgagccgatcatgaaggttgaagtaaccatgccggaagaatacatgggtgatgttatcggtgatatcaactcccgtcgtggccgtatcgaaggtatggatgacttaggcggcggtaagattgtcagagcattcgttccgctggcagagatgtttggctactccacagatttacgttccaaaacacagggacgtggtaactactctatgttcttcgagaagtatgagccagtaccaaaatctgtacaggagaaggtgcttgctgagaaaaacggtaaataatccgttgatccccaaaaggacttcagcaggccggaaaatccgggtactaaatggactccgagcggcttaaaaccgcccggaatccatcaaataggcttgaaaatagtgcataaatagcatataataaaagacagcctaacataaaaatgaaagctcaaaagagcacaaattaaggaggacgttataaaatgggcaaagctaaatttgaaagaaccaaaccgcattgtaacatcggtaccattggtcacgttgaccatggtaaaacaactttaacagctgctatcacaaagactcttcatgagagattaggtactggtgaggctgttgctttcgagaacatcgataaggctccggaagagagagagcgtggtatcacaatctctactgctcacgttgagtacgagacagagaagagacactatgcacacgttgactgcccaggccatgctgactatgtaaagaacatgatcactggtgctgctcagatggacggcgctatccttgttgttgctgctaccgatggtgttatggctcagacaagagagcacatcctgctttcccgtcaggtaggcgttccttatatcgtagtattcatgaataagtgcgatatggttgacgatgccgagttacttgaattagtagacatggaaatccgtgaactcttaaacgagtatgaattcccgggcgatgatacaccaatcatccagggttctgcattaaaggctcttgaagatccgaccagcgagtggggcgacaagattcttgaattaatgaacgctgtagacgagtgggttccagatccggttcgtgaaacagacaagccattcttaatgccagtagaggacgtattctctatcacaggccgtggtactgttgctacaggtagagtagagcgtggtacattacacgtatctgatgaagttgaaatcgttggtatccatgaagagacccgtaaggttgttgttacaggtatcgagatgttccgtaagctgttagacgaggctcaggctggtgataacatcggtgcattacttcgtggtgttcagagaactgaaatcgaaagaggacagtgtcttgttaaaccaggttctgtaaagtgccacaagaaatttacagctcaggtttacgttttaacaaaagatgaaggtggacgtcatactcctttcttcaacaactatagacctcagttctacttcagaacaactgacgtaactggtgtatgtgatcttccagaaggcgtagagatgtgtatgcctggcgataacgtagagatgactgtagagttaatccacccagtagctatggagcagggtcttcgtttcgctatccgtgaaggcggcagaaccgttggatcaggaaaggttgctacaattattgaataatgcgtaagcaatgagcagtgcaaaaataaatgcggaaacacccggaggagagctcgctcttcgccgggtgtttttgcatttatttttatagggcgaaagcccggagcttcttgtccgccgactttgcggacaagaagatgcactgcggactggcgggaggccaaaggaggaatacccatgaaactatttatcagtgccgacatcgaaggctgtgccggtctaagctttaccgaagaaacacacaaaaatgaagctgtatatcaaagatacgccgaagaaatgacaagagaagtcgtgttagtatgtgaggcggcccatgccgccggagcagacaccattgtagtaaaagacggccacggagatgcctccaatataaaccctcttgcgatgccggagtacgttacgctgatccgaggaaagagtggtcatccatacaacatgatgttcggacttgacgaaacctttgacggagtctttttccttggataccatgcggccgccggcagtccggaatttgcagtcagccatacgtctacgggaaacagccagtacatccgtctaaacggccgttacatgagtgaatttatgctaaacacctgcacggcttattcactggggattcccgttttgtttctgtccggcgacgaagctgtgtgccgggatgccagagaactggcaccacatatcgctgctgccggaataaaacacggcacaggcggcgctacgttctgtgtcccgcagtccgtagtggacaggcgtctccgggaagcggccggaaccgctgtggaaaacttaaagggatccctaataccggcagtcgcacttcctgacgaatttatttatgaagtaacgtacaaagactggaaaaaggcttaccagatgtccttttacccgggcatggagcgtgtggaccgttttacgaaccgcctgaaaaccgaacactggatggaggttgtcacagcacacagcttcgtcgtttactagagcatgtctgtaccaatattgtaagtaaatttagaattccgtaataaaaacgttattgcaaatggtagggcaattgggtatcatggtagggtacatatagtcagacatcacggagggaacaggaatggatagtaagttgatacgaaaaggagcggcaggcatactgattacagtgctcttgtgttttaccggtgtgtttgcttcatttgccagtacggaggaaactgcggacgcagcggaagctgagacacaggggccaaaggtggagtcgtcaatcacctcctgcctgatcaatcccgataagaagagtgtgacggtaaaggtcaccagcagcggagacatgaccggtacggatggagttctctatctggtggagcagaagccgtatcagaaggatttagagggacgcctcgattatgcgggagctgcagcgttcggaacagaagttacctatcagtttccgcttaacaagggaactgcggatgaccggttatacagccggttcgtggcagcggtctgggatggaacaaaatatatcgaagtcagcgagccgcattatataacaaatcccgaggcggtagcgtccaacacggctgaatttaatgatccgctgacgaaaaaagggcttaatatcgaacttaatatgcttgcggatgcgtttgaactgggtgtcaagcacgtaggtaccaacattgcgttccatcagattctgggacagggaattgattaccagtacgatgggaagacgtatcactttgataagcgtgtcattgaggattacgacaggaccataagcgcactttccgggaaaggcatgacggttacggctatcattttaaatggctggaatgatgctacaccggacctgatctatcccggtaccaaaaagtcctccaatgcattttattatctgtttaatgcagcgacagaggccggtttcgagcagacaaaggcgattgcctccttccttgcagagcgctatgacggttccaatccggatcagggcaagatatccaactggattatcggcaatgagatcaataaccaacagtggaactatactggcgcatgggatttgaacagctacgttcaggcgtatcaggatgcgttccgcgtgttctatacggcaatcaagagcgtcagcgccaatgacagggtgtatttctctctggattacaactggaacaatgagattgacaataagttaaagtatggcggaaagaatattgtagatacgtttaattccatcgcggcggttcagggccagatggactggggactgtcttaccatccatatccggcgccgatgacagaaccggagttctgggatgatgctcagaccggatggattaccagtgattttaattcccctgtcatcaactttgccaacttaaatgttttgacggattacatggcacagtctgcattccgctcaccgaccggagatgtacgccatattatccttacggaagaaggctttacggccaagagtccgacaagaggagacattccacagattcaggcggcagcatttgcctattcttattatctggtggacagtaatccctacattgacgcttatattttaagccgtcaggtagatgcaccgctggaggtgcggagcgggctggctttcggcctgtgggaatgcgatatgaacaagggtgataccattgtggccacaagacgccgtaagatatggcaggtattccgggatattgacaagaaaaaatatacgctggaagctacggattttgcaaaaccaattgtaggcattaacaaatggtccgatatcattccgaatttcagatggagagccatggaacagtagagaacgggcgggaggagtctgaaacttcaccggagacgtggatctcctgtgacagccggactccatgccctttatagaaaatgaacgtgattgtatgacacaaaacgtatgtgtcggccggtcacgtttatttttatagtaagaccggaggcctgactggatagttcaggaaacggcctgatgaaatgggggaaaccgaatatgatagaagagagaacagggaagaagagagagatgcagggaaagaatggaaagaaaaatagccagaaaagggatgatccgtataatcttgtcatactggaaaaaagaagcagtgaactgattgcctgtctgaccggaatctggcggcgctctgtaaaggagacccatctttttctcaatgatcaggagatcagaaaaatagaagcgtatgttccggaggcgcttcttaaggtccctgtactgatcattgctgtcaatgcagagaatgagccggccgcctttatgggggcggatagcgggcggcttaaaatgctgtttatagaaccggaggaacggggaaaggggctgggcggtcggcttcttgcctatgggattgagaagcttggaatacgggaactgtgtgtaaatgaacaaaacccgcaggcgaaaggcttctatgaacatatggggtttacctgttacaaaaggacggatacggatgaacagggaaatccttatccgctgctgtatatgcgtctgagtgagagaaaggacgtacctgtttaatcttcgacaggtacgtcctttttacggctcccaggagcctgatccaatcttccgttactgctgataactcagtgcggcatacgcatcaagtattccgccgcttaccatctttccgcttaactggtctgatttccggctggaattcagcagaatatttttcacatcctgaagagaaagctcggggcggtaagaatagagcatcgcggcgactccggttaccataggggccgccatggaggtgccgctcatgaaaccgtaatcattgtcgggcagcgtgctgacgatataggttccgggagctgcaatatccacgctggcggcgccataattggagtcacggcttaagttcccgtcaaacagtaagttggcaacggaaatgacattgtcaaatggaaacgatgcgggataaacgggatagagatcggtgtcatatcccttcccggcgaaaccgccgttgccgcaggcgacgatgaacagcatcttcgaattctgcatggtctgggccagcgcttcgttataagaggaggttcccatactcaggttgcagatggaggcgccattggcttcagcatagtggatcgcctcgattacggagtccggggaaccggttccgtcactgccgcccaaggccttcagcgacatgatctttacataactgttatccgtgatgccggcgattccataggagccccggaccgcagcgatggtaccggcggcgtgagtgccgtggctgtcttcctctccaacaaatatctggctgctgccggaataaaagttccagccgtgaatatcatccacgtaaccgtttccgtcattgtcgattccgtcaccggggatttcaccgggattcgtccacatggcattggaaaattcctgatgattataatcgatccctgtgtcaatgatggcaacgacgacggaacgcttatgttcggactggtcatagaggtcccaggcgggacgaatgttaatatcgacgccggtaactgcatcggtaaccgtcgactcaaagtctccggggcccagcccgggaagaccgaaaccgcctttgccgcgggagtaaatattgtcagcggcctgaaatttcgcttttatctcaacgagctgaaattcaccgtcatttttaagtccccactgatagttggaaaactgatctgccggggataagtttacaactcccggacccagcgcaaaggcctgcaggggccggccgctctggctgatggacagcatatcttcctgtgccgtcttcccggaagccgtcatatcactggccgaaccggacatggaaccggaaactggaatccatgggttcacggcatatgcggtgatagcaagggcgaaagaaagactgactgcacacattcttttcttcattctgatgattctccttatgccagggcctgtttgaaaattcattcccgcacagctgagtggaagctgcgttcaaacacaccccgggaacatttttctttagtataccataatccccaggcaaaggagtggaaaaatatgtaaaaattcccttaatattttctcaccagactggccagagccgaggccagcgcctcatgcccttcttttgtcaagtgcatataatcgattttattgttttctttcacgacagtgttggcatcaaagaagtgacagcccataagctctgcgatctttttgtattcactggaaagaccttccgatttttctgcacagccacgtcccatggtggcgcctacagccgtagtttcatactctttctcgatattttttggaaccaccaccagaatattgggccgtttatcacgccagcagtctgtcgtagagatggcctttgcaatcagacgtttgaggcccagcgcaatacaggcggcagatgcgccgaatcgttccttggtatcgttggttcccagcatgatgatcagtaaatctacgggttcatggctcataaggcatggataaatataatccagcccggaaagtccctcgtggatcggatcgtcaaagcaggtggtgcggccggataatccttcctcgaatacgagataatcgtctcccagcttcttttcaagaagccgcggccagcgctcattctcgttaaaacggccgtcatctgcggcacagtaaccgtgggtattggaatctccatagcatacaatgtgttttttcatgatatcctcctaaaataaaagagaggatgcagcctgcaagcaggtacatcctctcagactgttttttaagtcttttataaatcttttgtatcctcaactgcttttctgatatcccggtagagttccaccagcttcgggtcatccagggcaaccggaaggaatggaagtctgggatcgcccatcgggcagccgtcgagggagatgatgccttttactgcaccatgcatggacgggaaggaacagaggcggtaaatgagcggggtaacgagattctgaacctctctggccttttcccattcgccgcggttaaccagttcatccatctttaagtataattccggcatggctccgtatgtacctccgatcccggcgtcagctcccatcagacgtccggcgatgaactgctcgtccggtccgttaaatacgatgaaatccctgcctccggccagcttaaagcgcaggatatcctgtgccggatcggaggaacatttcactccggctacacgctcgttctccagcatgcgtccgaacagccccatggacagattgaatccggtcagctgcgggatgttataaatgaagaaaggaagatcggcagcctcggtaatttttgtccagtgctggtatacactttcctcgctcatgtggtaatatacacagggaactgcagaagtagcgtccgcgcctgcagcctctgcatgctttgcgagttcggtggaatgtctcgtatcaggacagcctacatggacgatgatattcatgcgtcctgccgcttcctttacaacagtttccgtcacagcctttctttcttccgaatcgagaaggaagccttcgccggtactgccgcagacatacatctgcttgatacccttgctgcagaaatagttaacaacggctttagtcgcttccaagtcaacatcaccattcttatcaaaaggtgtgttgagggcaacagtaacgtgtttgaatttgttgatgtcatactttgacataatacatacctgccttttcaattattataataattcaacagtatctgtgtgtatcatatcatcattactggcagaaatcaataaaaataaaaaacttttttttatttaatgtttgtattgaaaatattttttatacgtgctatgattaaaatagttaaaaatcccaaaatcagtaaaaaatataagagggggtatctaatatggattattcagtactggaacgaatcagaggtggtctgatcgtatcctgtcaggcattagaggaggaaccgctgcacagctcctatattatgtccagaatggcatacgcggcgaaagagggcggcgcagttggcatcagggccaacaccgtggcagatattgtggaaattaaaaagacagtggatcttccagtaattggaattattaaaaaagtttatggagactgtgacgtctatattacgcctaccatgaaagaggtggacgcacttgtcgagtgtggagtggatattattgcgacagactgtaccgaccgtatcaggccggatgggaagactctggacgagttcttcgcggaagtacgcgccaaatacccggatcagctctttatggcggactgttcctgttatgaggaaggccttcatgccgcacagatcggactcgatctggtcggaacgacgatgaacggctacacggagtatacgaagggagcagttctccctgattttgatctgatgaagagccttgtcgagacctgcggcaagccggtgatcgcggagggcgggatctggtcgccggagcagctaaaggcggctctcgacaccggagtactggctgcagtcgtaggtaccgcaatcacgaggccgagagatattacaagacattttgtagcggcaatacagtaaagaataggtgtgtaagacggacaaagaggccagaaaagttagtttctttgtcctttttctatcaggaggagattgttatgaggattgcggcactggatatcggaggaacctccatcaagtctggaatctggaatggacaggacatggtgggagtgaaggagcatgccaccaatgcaaaaaatgggggacggtatgtaatggagcgcgcagtggagatactccgtcagtacgatgattttgaagccattggaatcagcaccgccggacaggtaaattccgcagaaggatgcatccgttatgcaaatgaaaacattcccggatataccgggatgaaggttcgggagattatggagagagagttccatgtgcctgccgctgtggagaatgatgttaacgcggcagccatcggagaaggccagttcggagcgggaagggcatttaaagattttctatgcatcacctatggaaccggagttggcggagcgattgtcatgaataagcagatctataccggaaacgatggctcggcgggagaattcggcgggattatgattcatccagaggacagtgtgtatggagaacctttctgcggatgttacgaaaaatatgcgtcgactacagcgctggtgaggaaggccatggcttacaaccgggatctggacaatgggagaaagatatttgccagactggatgatccgaaagtgagagatattgtgaacagctggatcgatgagattgtgtatggactgattaccgttatccatattttcaatccggcctgcatcgttttaggcggcggcgtcatggcacagccttatattttaaatgaggtgaagcagaaggcggcagccaggattatgagcagcttccgcaatgcagagctgtgtcaggcacagcttggcaaccgtgccggcctgatgggggcggcttatctggcaggcattcgattggatcaggaggcacaggtgtaattgttttattaatgaacacaataaagcaaaaatgtatacaatattacaagtgtctgcaagggttatttgtaaatcggataaaaaatacataaatcataaaaaggaaaaaattttttttctattcaatgttgacaaaataaattttcagtaatataatgagtttatcaacaaccaaggcgtgacggatgaaggaccaataatccattacgcctttttatttcgaaaaaggaggaagtattgcatgaaattgaaaaaaatcttttctttgggactggcagcagcaatgacagcatctttactggcagggtgtggatccggtaacccggcgagttcgaccacagctgccaccgcggggggacaggcagagacgacagcagcaccggcagagccggcagcagcaggggactctggtgttctttacagcaacggcggtcctacggagttctttgagacgccgtggctgaatcccggcacctatatgtacaacaagactctctatgcacatctgatttttgctgatgagaacctggcgcctgtaagcggcgagggcgatttggccaagtcctatgagatgtcggacgacggaatgacgctggcctttgagctgagagataatattttctggcacgacggcgaagcgattactgccgacgatattcagtggagtatcgagtatgcactgaaaacaacggtattaaactccgtattccgttccacctttgaagcgttaaagggtgcggcggcttatgaagacggaagtgccgaacacatcgaaggaattgccgttgacggaaataagattacgctgacctttgaaaaggttgcaccggacgcactgctgacatttacgcagtttgctcctctgcctaagaagtatctggccgatacggatccgatttccttacagcaggccaagtacttccagagccccatcggttccggcccattcatggtggatgaggttcagatgaacaactacaccacgttaaagccgtttgacaagtactacggcggaacagcaaacttcaccatccacttaaatccgagtgcaggcgacagcgacgcgaacttcgtaacgaatgcgaaggcaggcaagctggattacgcttatacgaagaacatcgccgatgtcaaggcactggaaggaacaccgggactgaccatcgacaccgtaaacgtacgttatacccgtcttatgtatttaaacaagtttgataaaaaggatgggaaaaaagctcctctggccgatgagagagtgcgccaggccatcgcttacgcactggacatgaagtcgatcttagacggcgttttcgagggggctgcacttcctgcaaacagcctgacaccagacggagcagacaaggtggacggactgaacaattacgattacaatccggaaaaagcaaaggaactgttaaaggaagcaaactgggatccgaatacagagcttgatgtcgtttattactatacagatcagatgacacaggatcttatggcgatcattcagcagtaccttgcagaagtaggcattaagatgaatgcaagactggtggaaggcgatctggccaccatcctctggaaagctccggaagatccggttaacggaccgagtgcagttgactgggatatgtgctatgcagccaatgcggcattatccttacatgagtactacgacagataccagaccggttattccatcaactcccatacaccgagtgatccgaagctggacgaactcatcgcggctaccaattcttctgtagatgctgaagttcagagaaaggcattcttcgaattacagaagtatgagaatgaaacattattcgaacttccgctttactatcagccaatcttcctgctgcagagcgataagattgtaaaaggtgcgaaacttggcaacccgcagtttaactacaactgggatattcagaactgggaaatcaagtaacatatacattgaatggtcacattcaggaggtgctgttaagggattgtatgtatcaggtacagtcccttaacttttaagaaaggtgataaaatggctaaatacacaattaaaaaaattcttggtatgattcccatgctgttgatcattacgtttattatttactggcttctggatttaacaccgggcgatcccgtgtcgtacctgatggatccggaggcgcttgcgaggctgactgccgagcaggtggcggcgctgcgcgcgcagtatggactggatgatccgttttttatccgttattttaaatggctgggccgcctgctgaccggcgacttcggctacagttcttccagcggagtgcctgtaatccagatcatggcggaacggcttccggcaaccctcgagctggcggtagcggcactttgtatctcaaccgtattaggaagcattctcggtgttctgggcgcggtctacaaaggaaccatcggcgacaacgttctgaccgtagccggtatgatcggcgtttctattcctcagttcttcttcggtgtctgtgcaatcttaattttcgcattaaacttaggctggcttccggttggaggacgaaccgatccgaccgtggtcaattttgcagggcgaatcaagtatctcgtgatgccggccctggttctgggaatctccatgactgccggcgttatgcggtatgccagaagcagcatgctggataccatgaacaaggattacataaaaacggcccggagcaaggggctctctgaattccgggtcaatttggtacacggtttccgcgtatccttaacacctgttatcgtcctggttggcttccgtcttccgactctgatcgcaggttccgtagttatcgagaccgtattccagtggcctggaatcggaagtgcattcaatacggcggttcgttcgcagaactataatctggtcatgatgctggcactgttattcgtcttcatgacactgtttgccagtacgctggtggacatcctgactgccgctttagacccgcgtattaagctggaacgataggagggacggaagatgagtataaaatcaaaacagttgcatttaaaccgaaagtttgatcaaatccggcagatggaggaagccggggagctgaagaacaggaaatccggcaaccgggcgctgcgaaagctattgaataaccgtctcgccattgtgggaggcgtgatatttctgataatccttctggcctgtatctttgctccgcttttaaccggctattcgccgaaggctgtggatatgaaatccattttaaagccgccgtccggcgagcactggtttggaacggacaagatcggccgggatgtatttgcacgtgtcttatacggcggccgcatgtccatcgcgatcggattcggaagcgccctgggctgtgcgttcatcggcgttctgctgggatgctacagcggctaccgcggcggctggttcgacaggctgatggtccgtatctccgaagtgttcatgtctattccgcagctgattctcgttatgatgctggtagcaattatgggacagagcgcgaaaaatattgtgattatctttatcatctgtggctggggatcctgtttccgaatggccagatcacaggttttatccatccgggaggaggaatacgtacagtccttaaaggtgttcggactcaatccgtttatcatttgttataagcatatactgccgaacgccttaagcccgattattgtcaatgttacactgagtacagccatgtttatcctggaagaggcttcgttaagcttcttaggcctgggcgtaccgctggaagtcccgacctggggcaatatattgaatgcggctcaggatatgtttacccttcagaataactggtggatgtggctcccaaccggtattgtggtttccttattcgtcatgagcatcaacttcatgggcgacggcatcagagataccacagatccgacacagcagggctaggaggcaggatatgagcgataatgtagtaatttctgttaaaaatttaaagacgtatttctatacgaatgagcgctgcaaccgggcgatcaatggtgtttccatggacattaaaagcggcaagacactctgcattgtaggagagtccggctgcggcaagagtgtgacggctacttccatcatgcagctgcttcccaagctttccaggattgaggaaggggaaattatctatcacagcggggataagcggggagatattaagatccatgaactggagagaaatggaaaagaaatgagggatatccgcggaaaggatatcgccatgatcttccaggatcccatgactgcgctgaacccggtctatacgatcggctggcagattgaagagatgatccgttcccacaacaagaatgtgacgaagaaggaggccagggaaaccgccttaaagcttctgaccgacatgggaattccgaatccccagaagagaatcgaccagtaccctcacgaattctcaggcggtatgcggcagcgcgccatgattgccatggccatgagctgcaatccgaaggttctgattgccgacgagcctaccacagctctcgacgtgaccattcaggctcagattttcgagctgatggatcacttaaagaagaactacaacacggcgattatgctgattacccatgatatgggcgtggtctgtgaactggccgacgatgtggccgtcatgtatatgggcaacatcattgaaagcggctctgcggaggaagtgctggatcatccgacccatccgtatacgagggcgttattaaagtccatcccggttctgggaagaggcgcggctcaggacatcaacccgatcaagggttccacgccggatccatacaacaggccggccggatgccagttcgcgccgcggtgcgactacgcctgtccggaatgcgataaatgcatgccggaggaggtacagcttggcggaactcacatggtacgatgcgcacggtatcaggaggtgacaaacgatggcagataagagtaaagaaaagaataaagaagcactgctcacaattaaaggattaaaaacgtattttcccgtgaaaggcggctttatgggaaagacccagaactacgtccaggccgttaatgacatagacttaacgatttacaaaggggagaccctgggcctggtgggcgagtccggatgcggaaagacgacgctgggaaaaacaatccttcagctctacaagccgacggagggggagatgatctatgaatttgagaatggcccccgcaatctggagaagttaaccagtgcagagatggatgaggccagaaaaaagattcagattgtatttcaggatccccagtcctccttaaatccctccttcacaatctatcagtccctgtccgatcctctgaagaaattcggagtcaggacgaaagaggagagacgaaagatcatcggcgatcttctggaggctgtaaatatgagacgggaatatatggaccgctttcctcatgaattttcaggcggacagagacagcgaatcgggatcgccagggcactgtgcatcaatccggagctggtaatctgcgacgaggcggtcagtgcgctggatgtgtcgatccaggctcaggtattaaacctgttaaagaaactgaaggaagagcgtaatctgacctatatctttatcacgcatgatttgagcgtggtggagtatatcagcgacagaattgcagtgatgtatctcggaagaattgtagagctggccgatgcggatgaactgtaccgcaatacgatccatccctatacccaggctcttctgtctgcgattccggtagcggatatccatcataagaaaaagaggataattctggagggggatgtaccttctccgatgaatccgccatcgggctgccatttccatggaaggtgcagccagtgccgggaaatctgtaagaaccagagaccggaacttaagaagtatgagattgacgggcgtgagcattacgtcgcctgccattttgcagaggaaaatatgaaacatgcggctgaaaaacgaaataacatgtgatgtgcttgtcatgggggccgggatcgcgggcattatggctgcgatctcagccgccgaagcgggggcggatgtctgtattacaagcggtacatgcatctgctccggttccagcttttatccggggacatgggggctgggacttgtcgggcccgagagtgaagcggacgaagaagatttggaatccgtgattttaaatgtcggtgaaggcatggcggatccggagctggtctctgtcctggtcagccatatccacaggggcacagagcggttaaaagcatttggaatccagctgaaggaagctgaacagaaaggggagaaagaattcatcccctgttttgattataaaaacagagactggcacgggatcgtgaaagacagcgcacggaaggttttccaggcgcgtttggaggagctgggagtcagaagctttccgggtacccggattttgcagtttattatgacggaaggacgggtgaccggcgcggtggcgattgcggaaaagaagggtctcaccgcgttctcctgtaaaagtctggtggtcgcttccggaggtctgggaggactgtttcagtaccggctgaatacggatgacgtgaccggcctcggtcagtatctggccctccggtccggggcaaagctggtaaatatcgaatttatgcagatgatgccaggatatctgtcgccggcgccgaagacgatctacaatgaaaaggtattcaagtacagtaatttctgccgtcaggatacggggcggtctgtctttgaggactggcggaaagaagacttagaagagcggatgaacgtccgctccacccatggtccctttacgtccagactttcatctgcaccggtagacatcagactgttcacggaatttttaaggaatccaaagggcgttacggtgacataccaggattctttaaagcagaatcagccggaatttgtcagaacctattttgaatggctgaaagaggagaagcatttgacgatcgacgatcccattcagctggggatatttgcccacgcttccaacgggggaattaagatcggaccagatggaagcacaggggttcccggtctgtatgcctgcggggaggcgacgggcggaatgcatggtgcggaccggctgggcggtttatcgacagccaatggcctggtgttcggagagattgcgggaaaatccgcagccgcctttagcggcagcagcagccaggggccggaatggtcagacgtatcgctttcggttataccggatgccggtacctgtctgaagcagattcaggaaatgaatttcgagtgcgccatggtgattcgtaatggcgcgcgggcggaacttgccttaaataagctggaacggctaaaagcattttgcaggcgtgaagcaaaggaattcagagaaggggacgacgtggcgggacttgatgtgtcctgccgcctgagggcggctctgtatctgtcggagtgcctgatgaaagcggttcggctgcgaaaggaaagccgtggttcgcattaccgttgggattacccggagaaaaaagaaaaattttccaaaaggattttatcagtatgggatgatggggtgaaaaccggctgggaataatttgtcagttaaaaagaaaattttaaattatataataaaaaaacttttttttattaattgacaaacgactgttctctggtatatgctattagcagaggcggcgtaggcgcgacggaaacggcatgatgcggtgccgtttccgccgtgcttttttgtaatagcaatccgtttttattacacaaagattatggcagtccatgcggtaaatacgactgactatactcatgccggtggaaacataaagggggatcaaacatgcagggagactttttaacaaaaatcagggcagagtacaaccaatttacaaaagcagagaaaaaggtagccgattatattctgcagaatccgagagaggtactgtttatgtcaatcacggatctggcagaggtatgtgaggttggcgatacgagtgtattccgcttttgcaagacaatgaatttgaaaggatatcaggagtttaagatgatgctgtccttaagccttcacgatggaaagccggggcttgggcagctggatggtgacatcagccaggaggacagcttcccggagatggctcaaaaggtgctgaacacgaatgtaaacgcgctgaaagagacattttcgcttctgaacgaggacaactttgataaggtaatcagatatcttcataatgcggaacggatctgcttctatggagtgggcgccagtatgcttacggccatgaaggcggccaacaagtttctgcgcattgaaccgaaggtgtactgcgttcaggattctcatatgcaggccatggtggcatccatgatgaaagagaatgaggtggcggtggtattttcctattccggagccacaaaggatacgatccatgtggcggaactggccaagcgtgcaggcgcgacggtaatctgcgtgaccagattcgtcaaatcgcctctgacttctttttctgatgtcacgctgctgtgcggggccaacgaaggaccccttcagggaggttccacctcggcggagatcagccagctgtttttgattgatctaatgtatacagaatactacaggcgatacttcgaaaaatgcagtaaaaataacgaaaagacttcttcttcggtcattgaaaaactctactaactaaagattattcctaaaaaaaataaaaaaagaaaatttttttatttcagattgacaaaaagaaaattccgatatataataaattcataaacgagaaaggcgcaaaattgataaaagtatacagattgaccaaatgcctttggcgttaatttgacttattataaggaggagtagtaatgaagaaaattttatctcttggtttggcaacggctatggtagttggtactctggcaggatgcggcgggaataaaccggcagagacagcggcagctccagagacgacgacagcagcggcaacagatgcagcgaaggcaccggagacaactgcagagggtgaaaccacgaatatcgtatggtgggcattcccgacatttggcgtggataccggatatgagcaggaagtcgttgacgcatttactgcgaagaatcctgacattaacgtcaaggtagagtatatcgactttacatccggcccggataagctgacggcagctctgacttccggtacagcacctgatattcttttcgatgcgccaggccgtatcatcgagtttggagaagccggctatctggttcctctggatgacatgttagacgaactgaagagtgatttaaccagccagtctctggttgagacctgcgtaggtgcagacggaactgcctggatgtatccgatttcttcttctccattctatatggggctgaacaaagaggctctggaaaaggcggatgcactccagtatgtaaacctggaaggcgaccgtacatggacgaccgagaatttcgtaaagatgtgtgaagcgcttcgtgatgcagctcccacacaggttccgggtattgtatactgcggaggacagggcggcgatcagggtacccgtgctctggtaaataatttatacggagcttccattgttggcgatgacggcaagtggaatatcagcgaaaacggtgtaaaggccctcactctgttaaagagcatgtatgacagcaaggctctcgacgcaggctttgatatggcagcggctgacgaacttcagaagttccagcaggagactgcagcgatgacattctgctttggtacttccagtgagattacctatgcatcggatgactttacgcagctttccgttccgttcccgtctgagaacggcaaaccttccttagagtatctggtaaacggttttgctatctttgataataaagatgaggctcgcgctgaggcatcgaaaaaatttgtgaaatttatctgtgatgatcctgaatggggtccgaagagtgttgttaagaccaatgcattcccggtacgtacttccttcggcgatctgtatcctggagatgagcataaagcaatgctggcttcctggagccagtactatggcccatattacaacacacgtgcaggatttgcagcaatgcgtccgctgtggttcaacatgcttcagcaggtattcaacggtaccgatccgcaggctgctgctgctgagttcaatacgagtgcaaacagcaattaataaataactgattatgaacggcaacatatacatggcttccttcttctgcagagcgcagagggaggaagccaatctttagggaggaagtgtaaacacatggcaaatacaactgtttccacacaaaaacccgggcattcaaaaaagaaaaaagaaaagatgcctgcacgcagcaaagtgctccagcgaagagagacgttcgtttcttacatgtttctgctgccggcgctgatcttctttgtagggttcgttatttttccgatggcgtcgggcgtgatcaccagttttaccaatgccagttttcaggatcctaaggggactgccgtaggatttgccaactatatccggctttttcaggataagattttcttaaaatcggcggtcaataccgtgattatcgtggtcgtatcggttcctgtcgtaaccgcattctctctgtgggttggaacagccatttataagatgcgctccggtatccgctccttcttccgctgtgttttctatctgccggttgttaccggttccgtagcggttgttgttgtatggaaatggatgtttgataagtatgacggcctttttaactatatcatcaggagctttggcgggcagccgcttccatggacctccggtgagtccatggccctctggtgtattattctgattctgtttacgacctccatcggccagccaatcgttctttacgtggcggcgttaggcaatgtggacgcctccatggaggaagccgcaaaggtggatggagccaataatttccaggtgttctggaacatcaagtggccgtctatcatgccgacgacactgtatgtggcggtaattaccaccatcaacagtttccagtgtttcgcgctgatccagcttctgacctccggcggcccgaattacagcaccagtacggtaatgtacctgctgtatgagattgcatttaagaccaccaaggagtttggatatgccaatgccatgggtgtggttctggcgattgtaattgctctgttcagtgccctgcagtttaaggtcatgaacggcggcacatcggaataggaggagcgaaagatatggaaaataaaaagaaaacaatcagtccgtattatattgtttcactcatcctgctggcagtcctcgcagttttcttcctctttccgctgtactggattattaccggttccgtaaaagagaaaagcgatattattatcaagtccggcgaaatggtaaagtggttccccacaacaattacatgggataactataaccggctcttcaagagtggaacgaaactgttcggcattggtatgccgatggcaattcgatggttgtttaacagcgtgtttatctccgttgtggcgatggggcttacctgtatcacctcttctctggcgggatatgcactggcaaagaaacgtttctggggtaagagtgtgatcttcggactgttcgtatgcgctatggcgcttccgaaacaggttattctgattcctttgatgagacagatgtccgcgatgggatttttaaaatccgtatggggctccatgtttgcggtaatcttcccggtagtaggctggccgttcggcgtatttatgatgaagcagttctctgagaatattccgacgtcccttctggaggcatgccggattgacggagcaggagaactgaccaccttcgtgaatgtggcatttccaatcatcaaaccgggatttggtgcgctggctatctttacatttattaactcctggaatgaatatccgctgcagctggttatgctgactcagaatgaatcaaagacgattgctttaggtattgccagtaagctgagtgagatgtccaacgactttggactgatcatggccggtgcggccctggcatccgtcccgatcatcatagtattcctctgtttccagagatactttacgcagggaattacgatgggtgcggtaaagggttaagagaacgaaaacggaaggctgcgcatctccatataatacatataatataggaagagactgactggaatgaatccgtccgtctcttctttttttgagagttgttacagtgtacctggtgtccgcggccccaacagcccgctttggctcctgcggatttgactaaatgtattgcctgttcttttcctgatgtgatagaataaaatagatatcagaatgagaggggaggtaccgtgaccatggcagaaaaaacattcagaaacaaaatatactggtttaccttcctgttcagtgtgctggttatctgggtgcactcctataatgccgtgctgtttctgggaaataccaaatcggcggcttccctggtgcgtctggaacgtttttttggagacagaatcgcccagatcgccgttcccggcttttttatgatctcctcctacctctttttccgcggatacagaccggagatcttaatgcgaaagtggaactcccggatcaggagcgttctggttccgtatatcgtgtggaacagtctgtactattttggctatgtgatcggaagcaggcttccttatatttctgatgtgatcggtaaggggaagattccgttcggccttccggaaacggttgatgcaattctgaattatacctataattatgtattctggtatctgtaccagctgattcttctcattcttcttgctccccttatttacctggcggtaaaacgggtttggcccggaatcgcgtttctggcagttttgctggctggcgtctacctgggaattgatctgccgctgctgaacctggacgcactgttttactattccttcgctgcctttgcagctgtgcacggaaaagcggtggtggaaggcgtctggacgcggaagcgtctgcttgcaggaatcgcgcttatgattgccggctgcatctccctgggaacggatctgcccggcagcagtctgggagaggcggcatctgtcaccgtggtttaccggcttctggttccggtgggcttatggctcacggttccggaggagcgccttttcgaggccagggattttatgaagaataatttctttttgtatgcggttcactttgcactcgtacggctgatcaacaaaacgggagcattgctgctcccgcctgtaccggttcttgcatttcttctgttcttttttatgccgctgtttgcagttgtgttaagctggctggccggcggcctgatccggcgtttgatgcctgccgtgtggagactgttaaacgggggtcgatgaccagcggcctgaggcaccgcatggaagtacgaggcccgtccgggtaaccggaagaccgacctcctccgaccggacgaaaccgccgtgtttctttcccacttcgatggaaagcatgtaggttaagacggcgggggccaggcccgtggtataggagttgataagatagaagagcggatcatccgagagaagctgggcacagagctttaccagcggatgaatggattcttcgatcttccagatctctcccttggggccgcggccataggagggaggatccatgatgattccgtcataatgattcccgcgccggatttcccgttccacgaacttgacgcagtcgtctacgatccagcggatcggagccgattcaagacctgaggaacgggcgttttccttcgcccatcccaccatgcccttagatgcgtccacgtgagtgaccgatgctccggcagcggcagcggctaacgttgctcctccggtgtaggcaaacagatttaagaccttgaccgggcgtccggcctctctgattttagcgccgaaccagtcccagttggccgcctgttccggaaacagtccggtatgcttaaaactgaagggcttcagctgaaatgtgagctctctgtattgaatactccactgctgaggcagatcgaagaattcccattctccaccgccctttgcgctgcggtggtaatgtccgtttctatgcttccagcctttctctgtcttcggggtggaccagattacctgagggtccgggcgaaccagtgtgtagttcccccaccgctccagtttttctccttctgaacagtctattacttcataatccttccaaccgtctgcaatccacatgccgtttatccctgacctttctgtattcaccgtaaattcatttcatgattctatgattatactggataaggcgaaaagcgtcaagggaagcgggggctgaactgcagacgatacagttgcattgttacgaaactgtatatgatccgtaatctgcgtaaaaattgtaatagaaatgaaagataataatagttgaataatttcagataaattgctacaatgaatagtgtaaaaaggagaatcctgtaaggagtgacaatatgaagagaaaaggtttcgttgtgctggcggttgctgcagtactggcattaggaactgccaccatgagcgcatgggcagcggagggatgggcgcagtctggaaatacatgggtttactatgattccaacggatataaagtgaccaatgtgtggaaaaaaggcgcggacaacttatggagatatttgaacggcaatggcgagatggccgtgaatacatgggtagataatacttattatatggattctaacgggattctggtaacggataagtggatgaagtttcaggagaccggcagctccgagtataagtggtattacttcggaagcagcggaaaagcgattatggataactggtccaagattaataataaatggtattattttgattctaacggtgagatgcagactggctgggttctggacaacatgtattactgcggtacggacggagccatgaggacaggctggcagaagctgtttccgccggacagcgattacgatccagaccgcatgtctcccggagatgagggcgacgacggcaagcactggtactatttcagtgacagcggcaagaagtatatgccgaaggataccagcggagactatggtacctataagattgacggcgtagcgtactgcttcgattctgacggagcccttcagacgggctggaagaatgtcggagtggataatgcggattacgatatccagaattacaagtattacgattccagtgggaagctaagaaccggatggtattcagtagaaccgccggaggatttaacgggatatgaagatgaggtggaatggttctatttctctaccaacggaacgccaaaggcggggccgaaggaaggggaggccacgacacagaatttaaccaagattaacggaaagacgtatctgtttaacgacaaggggaatccggtctacggccttcagaaggtcaggattggaagcagcacggagtataccgcttactattttggtgacaagaagacgagtaccatgcagaaggggaagatcaaggtcagcgagggagacggcggtgaagagacgtattacttcagcgacagcggccgtggctataccggagtaaaggacgggtatctctattatatgggcaggctgcagagagcggaggacggtgtcagatatgagccgattacgattccggctggaaacagctacacgacctatgtagtaaactcctcgggcaaagtcgccaagaacacgacggttaagaatgcggatggggtgaagtacaagacgagcagcagcggctcccttttaaaggtggatgacgagaatgcctccggaagctatcgtgagccgaccgaaccggtttggaaagaataagaatccgtgtaagagagattcagaaggaatatcatagacatgacaggaatgcaggattggagcagaaaaggcggctctgatcctgttttttgtctggctgatccggcttatctgcccttcgccggttcggcaccgcagctggctgcgtttcccggaccgaggcatggacaggtgggatgcaccggttctttacagttattattaataagaagaaactaagaagaaacagcgaaatatgccacgaaaacagcggatttgcagcggatgggaaaaaatcaaaaaaaattataaaataaagaaaaaaatgcttgcaatgtaaaaaaaagtgtgctattctgtaaaggctgtggcatgatagctgtgaagcgtgaggttgctgtctgaattcaccgaacgaaagtgcgggaagcaaaggcaggttttccgtggagcgaatgtcaagttaggaaactggcgacaagtcactgtacaattaaagaattctgtttcgaaaaaacggaaagtcagtgtggggtcctggaggacacacacgggaacgtgtacagtcaccgcttgtcgtacttctattaagtgcgaaaaggaggcgactttttttatggcaagtcaagtaatgagaatcacattaaaggcgtacgatcatcagttagttgatcagtctgcaagcaaaatcatcgacactgtgaaaaaaacaggatcacaggtgagcggaccggtgccgttaccaacgaagaaggaagtggtaaccatcttacgtgcagttcacaagtacaaagattccagagagcagttcgagcagagaacgcacaagagactcatcgatatcattacaccaagtcagaagactgtggacgcattatccagactggaaatgccggccggtgtatacattgatatcaagatgaagaacaaataagcattcttcatcacatcaattaaggtaatatcctgaagggtttagatatagaagcaacacaccattccgccgaacctcggtgaggggaactctccagttcctccaaaggaatcaacatctcccgaaaagcccgctgtgtaagcaccagagggagcttcagacggagtcatagtgttccacttatattggactgttctaggatgattgcagaagggatttataatcccggcaatccgctgtagaattaacaaacaggaggtaaaaacatgaagaagggtatattagctaccaaagtcggaatgacacagatcttcaatgaggacggagtattaactccagtaacagttcttttagccggcccgtgtgtagtaacacaggttaagacagctgagaacgacggttacgatgcagtacaggttggttttgttgacaagagagcaaaacttgtgagcaagccagtgaaaggccactttgataaggccggtgtatcttacaagagatacgtaagagagttcaagttcgagaatgcttccgagtattccgtaaaggacgaaattaaggcagacatcttcgctgcaggcgataagattgatgcaaccgcaatctccaaaggtaaaggtttccagggtgctattaagagacacggacagtccagaggacctatggctcacggttccaagttccatcgtcatgcaggttccaacggttcctgttctgacccgagcaaggtattcaagggcaaaaagatgcctggacagatgggtaacaagcgtgtaacaatccagaatcttgagatcgttaaggtcgatgcagagaacaacttaattctggttaagggcgctgtaccaggaccgaagaagtccttagtaacaatcaaggaaacagtaaaagcagcagtttaatgcttttataagaaaggaggaacacacagatggcaaacgtatctgtttacaatatggaaggtaatgaagttggcacattagagttaaacgatgctgtgtttggtgtgaatgtaaatgagcatcttgtacacttagcagttgtcagccagcttgcgaataagcgccagggcacacagaaagcgaaaactcgcgctgaagtatccggcggtggaagaaaaccgtggaagcagaaaggaaccggtcatgcaagacagggttcaacaagatctccacagtggacaggcggcggagttgtatttgctccaacaccaagagactacacgatcaaactgaacaagaaggaaagaaagcttgcgcttaaatccgctcttacaagcagagtgaacgagaataagttcatcgttgttgacgagttaaagtttgacgaaatcaagacaaagaagttccagaacgttttaaataacttaaaggtatccaaagcacttgtagttgttggcgatgacagcacaaatgcagtgaagtccgcaagaaacattccggctgttaagactgcttttgttaacacgatcaatgtatacgatatcttaaagtataacacagttgttgctaccaagactgctgttgcagcaatcgaggaggtgtacgcataatggcagatattaaatattttgacgtaatccagaagccgatcgttactgagaagagcatgaacgctatggcgtccaagaagtatacattcattgttcatccggaagcaaacaaggctatgatcaaagaagctgttgagaagatgttcccgggaaccaaggttgccagcgtgaacaccatgaacttagaaggaaagaccaagagaagaggaatgaccttcggcaagacagcaaagacgaagaaagcgatcgttcagctcaccgctgacagcaaagatatcgaaatcttcgaaggactgtaagcagcccttcatctatgtgatgaacactatatcacgataaaatgaaacgcctggaggcgttgaagcacttgcgggcccgtaaggctcatgtataggtgcttttgttagaaaggagagttacaacatgggaatcaaaaagtataacccatataccccttccagaagacatatgactggttctgatttcagcgagattacaaagaagactcctgaaaagtccttaatcagcgctaccatgaacaagcaggctggtcgtaataatcagggtaaaatcactgttagacatcgcggaggcggtgctaagagaaaatatagaatcatcgatttcaagagaaactccaaagatggcattccggcaaccgttatcggtatcgaatacgatccgaacagaactgccaacatcgctttaatctgctacgcagacggtaccaagtcttatatccttgctccggctggtttaacagacggtatgaagatcatgagcggtgagaatgcagaggccagaattggtaactgcttaccattaggccagatcccggttggtacacaggtacacaacatcgaactttatccgggcaagggcggtcagctggtccgttccgctggaaactctgctcagttaatggcaaaagaaggcaaatatgcaaccttaagattaccttcaggtgagatgagaatggttccgataggctgcagagctaccatcggcgttgtaggtaatggagatcactcccttatcaacatcggtaaagctggtagaaaacgtcatatgggtatcagacctactgtacgcggttccgttatgaacccgaacgaccatccgcacggtggtggtgaaggaaagaccggtatcggccgcccgggtccatgtacaccatggggcaaacctgctcttggtttaaagaccagaaagaaaaacaagcagtctaacaagttaatcgttagaagaagagatggaaagaccattaaataattgaaggaggttagaacctatggctcgctcactgaaaaaaggaccattcgcggatgcgtctttactgaaaaaaattgatgctatgaacacagcaggacagcatcaggtaattaagacctggtcccgtcgttctaccatcttcccacagatggttggacatacaattgcagttcatgatggaagaaagcacgttccggtatatgttacagaagatatggttggacataaactcggtgaattcgttgcaaccagaacctacagaggtcatggcaaggacgagaagaaatccggacgtaagtaatagattgattaattgaaaggaggcttcaccaatggctaagggacatagaacccaaattaagagagaaagaaatgctcagaaggacacgagaccgtcagcaaagttatcttatgccagagtttctgttcagaaggcatgcttcgtattagacgccatcagaggcaaagacgcacagacagcacttggtattgtaacctacaatcccagatatgcttctactttaatagaaaagttattaaaatcagcgatcgcaaatgctgagaataacaacggtatggatccgtccaaactttacgtagaggaatgctacgcaaacaaaggaccgacaatgaagagagtaaaaccgagggcacagggccgcgcttatagaatcgagaagagaatgagccacatcaccatcgtgcttaatgaaagataaggaggcaaataatgggacagaaagttaatccacacggcttaagagtcggtgttattaaagactgggattccaagtggtatgcagaagctgactttgcagacaatttagttgaagactacaagctcagaacatacttgaagaagagattatacagtgccggcgtatctgatatcgagatcgaaagagcgtctgaccgtgttaaaattattatccacactgcaaaaccgggcgtagtcatcggtaagggtggttctgaaattgagaagttgaaagcagaagttcagaagatgacagataagaaattatttgttgatatcaaagaaatcaagagacctgacaaagacgctcagttagtagctgaatccatcgcacagcagttagagaaccgtgtttccttccgtcgtgccatgaagtccaccatgggccgttccatgaaggctggcgttaagggtatcaagactgcagttgcaggacgtcttggcggcgctgatatggctcgtacagagttctacagcgagggaacaattccgttacagacattacgagcagatattgactatggtttcgctgaagcagatacaacctacggcaaagttggcgttaaggtatggatctacaaaggcgagatacttccaactaaaggaaatagggaagggagcgataaataatgttaatgcctaagagagttaaacgtcgtaaacagttccgtggttccatggctggtaaggctttaagaggcaacacaatcagcaatggtgaatacggtttagtcgctttagagccatgttggatcaaatcaaaccagatcgaggcagcccgtgttgccatgacccgttatatcaagcgtggtggtaaagtctggattaagattttcccggataaacctgtaacagcaaagccagcagaaacccgtatgggttccggtaagggcgctctggaatactgggtagcagtagtgaaaccaggccgtgtattatttgaaatcgctggagtacctgaagaaacagctcgtgaagctttacgtcttgctatgcacaagttaccatgcagatgtaagattgctgctaaagcggatttagaaggcggtgataacagtgaaaattaataaatatgtagaagaattaaaggcaaaatcagtcacagaactgaacgaagaattagtagctgcgaagaaggaactctttaacttaagattccagaacgcaacgaatcagttggataacaccagcagaatcaaagaagttcgtaagaacattgccagaatccagactgttatgacagagaaggctaaactggcttaagcagatattttcatctcagtatgacacacacgaccgtgtggaaacttgtgagtgatagaaacacttttgagtgtactctgtatccaggaaacggatacaatcattgaaaggagtaacgtaacgtggaaagaaatttaagaaaaacccgtacgggcaaggtagtcagcaataagatggataagaccatcgttgtagctatcgtagaccatgtaaaacatcctttatacggcaagatcgtaaagagaacgtataaattaaaagctcatgacgaaaacaacgaatgcaacatgggcgatacagtaaaagtaatggaaacaagaccgctgtccaaggacaagagatggagacttgttgagattatcgagaaagcgaaataaattatttccaggaaggagtaacaggcatgattcagcaggagaccagattaaaggttgccgacaataccggtgcgaaagaattactgtgtatccgtgttatgggcggctctacaagaagatatgctaatattggtgatattatcgtcgctaccgttaaggatgcaacaccaggcggtgttgtaaagaaaggtgacgtagtaaaggccgttgttgtgcgtactgtaaaaggtgcccgccgcaaagacggttcttatatcaagttcgatgagaacgctgcagtaataatcaaagatgacaagactccgagaggaactcgtatctttggaccggttgcaagagaattaagagagaaacagttcatgaagattgtttccttagctccagaagtattatagggaggtgtcgactgtgcataaaattaagagagatgacctggtaaaggttatcgcaggaaaagatagagataaacagggcaaagttcttcatgtagatacaaagaacaacaaagtcctggtggaaggctgcaacatgatcaccaagcatgtaaagccgggccctggcaatccacagggtggtattgttcagaaggaagctgcgcttgacatctccaacgtaatgctcgttgtagacggaaaagctaccagagtcggcttcgaagtaaaagacggtaaaaaagtccgtgttgccaaggcgaccggaaaagcgattgactaattcggagaggaggaataaaaattggctagattaaaagaaacatatcagaacgaaatcgtagaagctatgattaagaaattcggatataagaatattatggaagtgccgaagttagataagatcgttatcaacatgggcgttggtgaagcaaaggaaaatgccaaggttttagactctgcggtcagagacttagaaatcatctccggacagaaggcagtcttaacaaaggctaaaaaatcaattgctaacttcaagctcagagaaggcatgccaatcggctgtaaggtaacattacgcggcgagagaatgtatgagtttgcagatcgtctgatcaaccttgcattacctcgtgtacgtgacttcaggggtgtgaatcctaacgcatttgacggcagaggaaactatgcccttggtatcaaagagcagcttattttccctgaaattgagtacgataaagttgacaaggtaagaggtatggacattattttcgttactaccgctaagaccgatgaagaagcccgtgaacttttgacattattcaatatgccatttgcaaaataacaggaggaatattccatggcaaagacttcaatgaagattaaacagcagagacctgcaaagttctccacaagagaatacaatcgctgcagaatctgtggacgtccacatgcttatttaagaaaatacggtatctgccgtatatgtttccgcgaattagcatacaaaggccagatcccgggtgtaaaaaaagcaagctggtaaaactggctggcgaagagccggtaaaaatcagcaaaggcaggctgatcctgctggcaggaatcaggctgggtttggtgatttttagaaattgcgcagcaatttcagcagcgtgagctgcgtgtccggcggaacaggcttatgcgccatttcaggaaaccaaccgacatcgagaaaaccgaaggttttcgagatgctttcggctagcagacaattaaagcaaaaggaggcaatgtatctcatgacaatgagcgatccaatcgcagatatgcttacaagaattcgtaatgcaaatactgccaaacatgatacagtagatgtaccttcatccaagatgaaattagctattgctgatatccttgtaaaagagggctacattaagaaatatgatctcgtagaagacggtgctttccagaccatcagaatcaccttaaagtacggcaaagataaaaatgaaaaaatcatcacaggaatcaagagaatctccaaacctggtttacgtgtatacgcaaacaaggaagagttaccgaaggttctgggtggtttaggaacagctatcatctccacaaaccagggcgttgtaaccgataaggaagcacgtgaactcggcgtaggcggagaagtgctggcatttgtttggtaatttaagaactactgaaaacagagaaagcgcagacgctttttccgaaaatttaaggaggtacacggcatgtcacgtataggaagaatgcctatcgcgattccggcaggcgttactgtcacaatcgcagaaaataataaagtgactgtaaaaggtccaaagggaactctggaaagagtattaccggctgaaatgtccatcaaagaagaagatggccagatcatcgttagcagacccagcgatttaaagaagatgaaatctttacacggtctgacaagaacactgatcaacaacatgatcgtcggcgtaaccgctggttacgagaagaaactggaaatcaatggtgtaggttacagagctcagaagcagggcaagaagcttgttctttccctcggctattctcatccggttgagatggaagatccggaaggtctggagtccacaatggaaggccagaacgtcatcattgtaaagggtatcgataaagaaaaagtaggccagtacgctgctgaaatcagagacaagagaagacctgagccgtataagggcaaaggtatcaaatatgctgatgaagttatcagacgtaaagttggtaagactggtaagaaataatttaaggagagtgtaaaaatggttagcaaacagtcaagaagcgaagttcgcgtgaaaaagcacaccagattacgtaatcgttttgcaggcactgcagaaagaccgcgtttagctgtgttcagaagtaataatcatatgtatgctcaaattattgacgatacagttggtaaaactttagtctcagcttctacagttgaaaaagaagtaaaggctgaattagagaaaactaacaacgttgatgctgcagcatatgtaggtaccgtaattgccaagagggctctcgaaaagggaatcaaggaagttgtatttgacagaggcggcttcatatatcagggcaagattcaggcattagcagacgcagccagagaagctggtctggaattctagtagagaggagaatagggcgttgaaacatacaattattgatgcaagtcagttagaattaaacgacaaagtagttgctatcaagcgagtatcgaaaaccgtaaaaggcggacgtactatgagattctctgctttagtagtcgtaggcgatggcaatggccacgtaggtgcaggccttggcaaagcaggcgaagttccggaagcaatccgcaagggtaaagaggctgctgttaagaacatggtaactgtaccggtagatgagaacagcagtattcctcatgatttaatcggaaaattcggaagcgcagcagttcttcttaagagagctccggaaggtaccggtatcatcgcaggcggtcctgcacgtgcggtagttgagcttgcaggaattaagaacatccgtacaaaatctttaggttccaacaacaagacaaacgtagttttggctacaatcgaaggattgactcagttaaagactcctgaggaagttgcaaagcttcgcggcaaatctgtagaagagattttaggctaaggaggataggataatggcagataaattaaaaatcacattggtgaaatccccgatcggcgcagttccgaagcagaaagcaaccgttgaagctttaggtttaaagaagcttcataagacagttgaaatgccggataacggtgcagtcagaggcatgatccagagcgtaagacatttagtaaaagttgaagaaatttaagcagaacagtaaggaggtgcaaacgatggaattatcaaatttacagcctgcattaggatccaaacacagcgacagtttcagaagaggccgtggccatggttcaggaaacggtaagactgcaggtaagggccataaaggacagaaagctcgttcaggtgctccgagaccaggatttgaaggcggccagatgcctttatacagacgtcttcctaagagaggctttacaaacagaaacagcaagactatcattggcatcaatgttagtgctttagagcagttcgaaaacgatactgttgtgacagttgagactctgctggagagcggcattgttaagaatccgcgcgatggtgttaagatccttggaaacggagaattaaccaaaaagcttacagtaaaggtagatgctttcagcgaaggcgctaagaccaaaatcgaggctttaggtggaacctgcgaggtgaactaatatgttaaaaacgctccgtaatgcattcaagatcaaggacatcagaaagaaacttctgtatacgttcgcgatgctggtggttattagaatcggttctcagttaccgattcctggagtagaaacagcatttttcaaagatttttttgctcagcagaataacgatgcgttcggcttttttaacgcaatgacaggcagttcctttaccaatatgtctgtgtttgcactgagcattaccccgtacatcacatcttccatcatcatgcagcttctgaccattgcgattccgaagctggaagagatgcagagagatggggaagacggaagaaaaaagattgcagaatacacccgttacgtaacagttgcactggcgttaattgaatccattgctatggcaatcggattcggcggccagggactgttaagcgagtttaacgcgatcagcgtaattatcgcagttgttacgatgactgcaggtagtgcgcttctgatgtggattggtgagcgtatcacggaaaatggtgtgggaaatggtatctccatcgtcctgctgtttaacatcatttccagtctgccctctgacgcatcaacactttataccagatttatgtctgggaaatcggttgcagtttccgcagtagccgccattatcattgtggcaattgtgattgcgatcgtggtatttgtcgttgtccttcaggatggcgagagaagaattccagtccagtattccaaaaagatgcagggacgcaagatggttggcggccagtcctccaacatcccgttaaaagtaaatacagccggtgttatcccggttatctttgcttcctccatcatgtcattcccggtagtaattgcccagttcttcggcagccggattaactatgacagcattggcggacatatccttctgatgctgaattcttctaactggttcaagccggaacgtccggtctactcgattggtatggtgatttatatcgccctgattatcgtgtttgcctacttctatacatcgattacctttaatccgttggaagtggctaacaacatgaagaaatcaggcggctttatcccgggtatccgcccaggcaagccaaccagcgattacctcaattccattttgaactacgtagtatttatcggtgcatgtggtctgacgattgtatgtatcatcccgattatggtatccggcctctttaatgtaagccgcctgtcatttggtggtacatccttaatcatcattgtcagcgttgtcttagagacaatcaaggcaattgaatctcagatgcttgtacgttattataagggatttttgaatgactaatggacaaatccaagaggaacacataatggcgtgtttctcttggtctttgtgctatatgaacatattgcagggagggactgctgatgaagattatcatgttaggtgccccaggtgccggtaaagggacccaggcaaagaagattgctgaaaagtatcagattccacacatttccacaggcgatattttccgttccaacatcaaagaaggaacagaacttggaatgaaggcaaaggcatatatggatcagggaggcttagtaccggatgagctgacgatcggtatgctgatggaccgcattcagaaggatgactgtaagaacggctacgtgttagacggtttcccaagaacgattccgcaggcggaaagccttacgaatgctcttaacgagagaaaccagaagatcgattatgccgttaatgtggatgttccggatgagaacatcgtgaatcgtatgtcaggacgccgtgcctgcttaagctgcggtgctacatatcatattgtctataaacccagcaaggtggaaggcatctgtgatgtctgcggtgacaagcttgtcttaagagatgacgataagccggaaaccgttaagaagcgtctgtccgtgtaccatgatcagacacagcctctgattgactattataaggaagccggcgtactggcgaatgttgacggaacacaggatatggaaaaagtgttctccgatatcgtcgctgttctgggagcgtaatgtatgtcagttacaattaaatctgcaagagaaatagaacttatgagagaggccgggagaatcctcgcgaagacccacgaggagctggcgaaagccttaaagcccggtatgacaacctgggatatcgaccatttgggagaggagatcatcagaagctacggctgcatcccttccttcaagaattacaacggctatccggcttcaatctgcgtatctgtgaacgacgaggtggttcacggaattcccagtaagaagcatttcatagaggaaggcgatattgtgagcctggatgccggcgtgatctacaagggataccattccgatgcggcaaggacgtacgggatcggcgaaatctcccccgaagcaggcagactcatcgaggtgacaaaacaaagtttctttgaagggattaaatttgcaaaagctggcaatcatctgaatgatatatcttctgcaatccagacctatgcggaaagcttcggctacggtgtggtccgggatctggtgggtcacggaatcggaagtcatctccatgaagatccggaggtgcccaatttcgcaggaaggcgacgcggcctgaaactgaggccgggtatgactctcgccattgaaccgatgatcaacgaggggacaccggaggtcgtgtggctcgatgatgactggacggttgtaacagaggatggagcattatcagcccattatgagaatacggtcctgattacagaaggtgaaccggagcttttaagcctggtttcggaagcccattagggagtttaagtgaggacagtatggagatcacaataggaagtctggtaaaaagtctggccggacacgataaagatgaagttttcttcatattaaaggaagaggtcgaatatgtttatctggtggacggaaagtaccgtacgcttgccagaccgaagaggaaaaacagaaagcatgtggaagccgtttcctgtgaagcggactgtccgggtaaaaagatcagagaaaaccagagagtcaccaatgaagagatcgctcgttttatcaaatgtttcaaaaaaaagcagtgagtaaagacacaggttgtcaggaggtaagattttatgtcgaaagcagatgttattgaaattgaaggaaccgttgttgaaaagcttccgaatgccatgttccaggtggaactggagaacggccatcaggtgctcgcacacatcagcggcaaacttcgtatgaactatatccgtattctgccgggtgataaggtaaccattgagttgtccccttacgatttgtccaagggaagaatcatctggagagataaataaaagtaaaaacaaggaaaaaatgcttgcattcccatatggaaagtgttataatgctatagcgactttgttgaaataccgggtgtattatgcccaaacggcagcactggtttattttagataaaacacattgcgggtatacctggatgtcctctttcggggacgcataacggaaaggagaattgctgtgaaggttagatcatcagtcaaaccgatttgcgaaaaatgcaaaatcattaagagaaaaggcagtatcagagtaatctgtgaaaatcctaagcataagcagagacaaggttaaaaattattaatggaggtgtactacacacatggctcgtatttcaggtgttgatttaccaagagaaaaacgtgttgagatcggattaacttatatctacggtatcggtagaacaagttcaaaccgcattcttacagaagctggcgttaatcctgacactcgtgttaaggacttaacagacgacgaagtaaagagaatttcagctgttatcgctgacagtcagatggtggaaggtgatttacgcagagagatcgctatgaacatcaagagacttcaggaaattggctgctatcgtggaattcgtcacagaaagagcctgccggttcgtggtcagaagacaaagaccaatgcaagaactcgcaagggcccgagaaaaaccgtagcaaacaagaagaaataagcattgaacatttcgtgagattactcacgatgaatgaaactaaaacagtgaatcacgttacatgttttaaaaacaggaataacaggattcaagaaatgaagaaagtaggttagtttaaaatggctaaaaaagtgtccactactaaaaaagtgacaaaaaagcgcgtaaagaaaaacgttgaacgcggacaagcacatatccagtcatcttttaataacacaatcgtgacattaacagatactcagggtaatgccttatcatgggcaagtgctggtggtctgggatttagaggttcaagaaaatctactccatatgcagctcagatggcggcagaaactgctactaaggcagctcttgtacatggtttaaaatcagtagacgttatggtaaagggtcctggttcaggccgtgaagcagctattcgtgcacttcaggcatgcggtttagaagtaaccagtatcaaggatgttactccggttccacataacggatgtcgtccgccaaaacgtagaagagtctaattaggaggtaattacagtggcagtagatagagttcctgttcttaaaagatgtagatcccttggtcttgatccaatctatttaggaatagataaaaaatccaacagagaattaaaaagagctaacagaaagatgagtgagtacggccttcagttaagagaaaagcagaaagccaaattcatctacggcgttcttgagaaaccattccgtaactattacgcaaaggcttccagaatgaatggtatggtcggtgaaaacctgatgatccttctggagagaagacttgacaacgtagtattccgtatgggctttggaagaacaagaagagagaccagacagatggttgaccataagagcatcctggtaaacggcaagtgtgtaaacattccgtcttacttagtaaaagctggcgacgtaatcgaagtaaaagagaaatgcaaaggaaacgccagatttaaagatgttgtagagaccacagcaggacgtttaactccggcctgggttgatgttgaccatgagaatttacgtggtactgttaaagagttaccaacaagagatgagattgatgttccagtgaatgaaatgcttatcgtcgagttgtactccaaataattgaaagtctgttaaagagaaacaacaactttcgcccggagtatgggaaactgtactccgggcaaggatttgagtataagaccctcgatacaaattacccaaaaggaggggctattagtgttcgattttgaaaaaccaaacattgagattgctgaaatctctgaggacaagaaatatggcaagtttgtagttgaaccgcttgaaagaggttacggtacgactttaggcaattccttgagaagaatcatgctttcttctttaccgggagccgcagtcagtcaggtaaaaatcgacggcgttttgcatgaattcagttctatcccaggcgttaaagaggatgtgactgagatcattatgaacatcaaaagcttagcaatcaaaaataacagcgacaccaatgaggcaaaggttgcctacatcgagtttgaaggcgaaggtgtggtaacggctgctgatattcaggcagacccggatattgaaatcatgaatccggatcaggtgatcgcgacactcagcggcggcacagacagtaagttctacatggaactgacgatcacaaagggccgcggctatgtaagcgcagacaaaaacaagagtgaagatttaccgattggcgtgattgccgttgattccatctatacaccagtagagcgcgtcaacatgacggtacagaacacccgagtaggtcaggttaccgatttcgataagctgacattagatgtatacacagacggaacactggcaccagacgaggcagtcagccttgctgcaaaggtgttaagtgaacatttgaatctgttcatcgatttatccgagaatgccaagactgcagaagtcatggtagagaaagaggataatgagaaagagaaggttctggagatgaatatcgacgaactggaactttccgtccgttcatacaactgtttaaagagagccggaatcaatacggtggaagagctgtgcaacagaacttctgaggatatgatgaaggttcgtaacttaggccgcaagtctttagaagaggtgctggcaaagttaaaggagttaggcttacagcttaacccgagtgatgacgcgaacagctgatcgctcgttacaggaatttatggagatttagcgcgggatgcagtaagaccgaagaagcatgcgccggcgttccacaaatggagggaaataagacatggcaggatatagaaagctgggaagaacttccagtcagagaaaagcactgatcagaagccaggtaacagcattattacacaatggcaagatcgttacaacagaagcaagagcaaaagaaatccgtaaagtagcagaaggactgattgctctggccgtgaaagagaaagacaatttcgaaaccgttaaagtaaccgctaaggttgcccgcaaggacaaagacggcaagagagtcaaagaagtggtgaacggcaagaaagttaccgtatacgatgaagtagaaaaagagatcaagaaggatcttccttccagacttcatgccagaagacagatgttaaaggtactgtatgatgtaacagaagtaccgcaggaagctgcaggcagaaagaaaaatacaaagagtgtagatcttccgaagaagttatttgaggagatcgctcccaagtacgtatcccgcaatggtggctacacaagaatcgtaaagattggccagcgtaagggtgacggggctatggaagtactgctggagcttgtctaagcactgagcagtgtcaaaaaacgccaggagaaaattttcgttgtgctagcacataagaaaattttctcctggcgttttttgtagggcgaacgccccacaccgaactggagcgcagcggaagtgaggtgtgcactgcggggcagcgggataccagaaaaggcatgtttatccgacgatgcgcaagcgagtcgtcgaatttcgtccttacatatttccccaccccctcaaatgtgttatgatacaaaagagcaatatagaaaataagtaaaaggaagagaaaaagaaagagagggcggttacaatgataaaatactacgaaggcgacatattcagctccaatgcagacttaatctgccatcaggtaaactgccagggagtgtttgggcgcggcatggcgggccaggtaaagaagctgttcccggaagtagaaaaatcctataaaattctgacaaagcagtggacagaggaagtgggcggcaagacggcgaagctgttaggccgggtatcagcccagccggttgaaaaggacggccgctggtttctgattgccaatctttacggccaggacgactacgggaaaaacggtgtctacaccgactatgaagccctggaaaaagcgttggaagagatctgtgagtttttaacggtgcggggaaggaacgagacagccgcgttcccgcagggaatgggatgtggatttggaggcggtgactgggacgttgtagaagccatcattaagcgtgtattcgaagattatccgggagaggtacagatctggaagtatgacggaaaataaatggaatgagataccaataagcagctttagaaaggatattgaatgaaagacaagtttgtgattgtagacggctcttccatgctgtccacctgttactatgccgtacttccacgagaaatcatgtttgcgaaaacggaggaagaaaagcagaagcattacggaaaaattctgcatgcaggagacgggacatacaccaacgcgatttttggtatgctaaagaccattgcctctctcctcaagaagcaggaacccggatacattgccttcgtgtttgataagacgagggatacgttccggcgggagctgtacgcggagtacaagggtacaagaggggcgactcccgaaccgctgaagcagcagtttgtcctgattgaatcaatcctggaggaagccggtttcagagtgctctacagcgatgactacgaggctgacgactatgcgggctctctggtcatgaagtttcgcagccaggtgcctgtggtggtcatgacaaaggatcacgattacctgcagctggtgaatgacgaatacaacgtcagggcatggatggtgcaggcgaagcaggagaaggcggatgaactgtacgaaaagtactacggcccctatggcctgacgaaaaaagatgtcaatcttccggagaagacatttgaatttacagcggagcatgtgtttgcagaggaaggcgtatggccggagcagatcaccgatttaaaagggattcagggcgatacctcggataacatcccgggagtgaagggggtcagcagtgcggtgccgcctctcttggctgaatatggaaccgtggaggcgatgtacgaggcgatccatgacgcggagacggataaaaaacagttaaaagaactccaggatttctggaaggagaagctgggaatcaccagaactccctacaaagcgctgacgaagaccggggaggacggggaactgtgcggggaagccgcagccctgctgtccaagcgtctggctgccattaagacagatattccgctggatctggagcttgctgatttttctgtggagaaatatcaggaaaaggttctccggaaatggtgtaaaaaactggatatcaaggaagcttccgtgtttggctaaagtctggctctgattcggcgtggatttctggtaaagaataccattcttgcaaatttattactcaatttttcctaaacgcaagaataaagaaagaatatcttaagttgacggtgaattgccccaggggctataataatagtaggaaaaatgcggagtaactataaagagtgggaggtatttttatgaaacggtttggaaaactattggctttgaccgccattgtgagtgttcttggggtgagtattccatttcaggcattcgctgcgtcaaagacgatttcatcagtgacgatctatgcaggattagaggaaatggaatccgggggaactcttccggaggaaacgtccttcgagcttaaggagaattcaacggggaattatgtgtatacaaacaacagcagatatgaggttaacggaatcgaatggattacctcaggatcgaaagagatgaccatcggatatgaacctaagatgagagtggaactgcatgccaccgattccgatgagtatgcatttaaagggggatatcagtccagtaacgtgacggtaaagggcggaacgtatgtgtcagccagccgttccggcagtgatacgttgtatgtgacttttaagtttaaaccgattaagggcacatacagttctcccgatgatgcctactggagagaaaacggttacggcggagcccgctggagtaaggttgataattcgtctgatgcctatgacgtgtatttataccgcggcagttctgttgtaaagaaggttgagggccttaaggccacgtcctataatttttatccttatatgacgaaagccggcacatattcctttaaggttcgcacagttccatataccgagagtgagaagaagtacgggaagaagagcgactggacggaatccgacgaggtttatctgccggaggagaaggtgtctgacggctccggacaggacaacggaacgcccggcagtaccagtcaggttggctggatcaaggacgggaacaactggtattttagatatccagatggaagttaccagaagaacaactgggccaagatcaatgagaaatggtatttatttgattccaacggtgtgatgctcaccggatggcagcagagaaataatctgtggtactttttaaacgatcagggagctatggtaaccggatgggtgttatccaataataagtggtattatttgaatccttccacgactacaggcgtagagggtgcgatgcttacgggctggatcgcctataataataagtggtactgtaccgacgcttccggcgcaatgcttgagggctggcgccaggttgacggaagctggtactacttctatcctggtgagggctccaaggcggtgaatactaccattgatggtttcccggttgacggcaacggcgtgtggcataagtaaaatcatcaggaaaggaagatgacacgatgcgaggaataaagggaaagggcagatggctgatacttctgggagcggtaatgacgctcggtaccgccatgacgtccatggctgcgaaaagtgttaagattcggtttgaaaacgatgtgagaagtgaatggacggaagatatcaaggtaccaaaggttacagtaaattacgacgaggtatcaccggagtggagtaagactccggaggactgggttcctggaaaaaaggtgactgctacctttacaatcgccggggactatgtgaagagcagctgcagtgtatacggcggagaactggtttcagccaaggctgcagacggcgagacgacaattaaagctacttacgtaccggtggcacagcttggagcgccggagaccgctggctggagtgatgcggcaaagacgaaggcatcctggaaacgagttccttacgcttcgaagtatcagcttcgcctttaccgggaggatcagtggattaagacgctgacgaccggttccacctccatcgatttactggaatatttacaggatggctacagctattactatgaggtgagagccattgcgaaggacagttccgaggagaagtatttaaaagacggtgaatttacggtttccactgattctgaggtccaggaactgggagatacatcgggacgatgggccaacacccaggccggcaaacggtaccgtgacgaggatggaaattatgcggcgaactgctggaagatgataagcggcaagtggtattattttaatcaggacggctacgcgctgactggttggcagtatctgaacagcaagtggtattatatgaatgaaaacgctgagatggtgaccggatggcagcagatcggcggaaaatggtactatttcaatgcgaatggcgacatggtgaccggttggcttcaggcagagccggggaaatggtattacttatatgaggacggaagcatggcggcgaatactgtcattgacggaacgtacaaggtgaatgagtcgggacagtgggtgccgtaagggaatttgttattcgggaaagacatggcggaaggcgccgtgtctttctttttttccggtctgactaagaagaattggtctgattatgaaatctggcttgactgttgcgtaaaattcaactaaaattatgtgacatataagacttcttatttttatggggattttcgttttttggaatttttgccggaagtctttgacctgatttttgtccgcgtttatcgcagaaaggtaagccatgggaattataaagacatcgaagctgatttttgattatatcagaagagatgaagaagaaaatatagaagaagtaaaccgtgccatcgatgatgtcagcatcgagattaaggaaggccagtttgtggcggtcttaggccacaatggttccggaaaatccacctttgccaagcaattggatgcgattctgcttccgacggacggcacggtgtggattcagggactggatacctccaaggaggagaatctgtgggaggttcgaaagaagacggggatggtcttccagaatccggataaccagattatcggtaatgtcgtggaggaggatgtgggctttggtccggagaatatggggattcccaccgatgagatctggaagcgggtggatgagagcctggaagcggtgggcatgacggcctaccgtatgaagtctcccaacaagctttccggtggtcagaagcagcgggtcgccatcgcaggcgtcatggccatgagaccgcagtgtatcgttctggacgagcctacggccatgctggaccccaacgggcgcagggaagtggtaaagaccgtccatgagttaaaccgtcaggagggcatcacggtggtgctcatcactcattatatggaagaagtaatcaatgccgaccgggttatcgttatggatgacggcagagtggttatggatggaacgcccagggagattttctccagggtggaggaactcaaatcctaccggctggatgtaccgcaggtgaccgagctggcttatgagcttcagaagaacggggtagagttaccggatggaattctgacgctgaatgagctgatgaaatatctgcttcctatatttgcggagcgttatccgggcagagtgactctgggagatggaggcagttatggcaattaagattgaacatttgaattacatttacgggcagggcactgcgttcgagcagcaggcgttaaaggatgtaaatctggagattcaggatggccagtttatcgggctgatcggccataccggttctggtaaatccacattgatccagcatttaaacggactaattaaggcgacaagcggtgcaatctattataatggagagaatatctacagcgacggctacgatatgagagcgctgcgaagccatgtaggtctggtgttccagtatccggagcatcagctgtttgagatcgatgtgtttacggatgtctgcttcgggccgaagaaccagggactgccgaaggaggagatcgaaagcagggcaagagaagcgcttactatggttgggcttgacgagagcttttataagcagtcgccgtttgaactgtcgggcggtcagaagcgccgggtagccattgccggtgtgctggccatggaaccggaggtgctgattctggacgagcccacggcaggtctggacccgagagggcgcgatgagatcctggatcagatagagcgtctgcaccgggagaagaagatgacgatcatactggtttcccacagtatggaggacatagcaaagtatgtagaccggattctcgtgatgaatcacggggagaaggtgtttgatgacaccccaagggaggtattcaaacattacagggaactggaggccatcggtctggccgcgccgcagatcacctatgtggtgcatacgctgcgggatcatggggttccgattgacaacaatattacgacggtagaggaagcgagagatgagatccttgcgctgttaaaaaaggaaggacaggcggcccgcgggaatggaagccgcggacaggagacaatatgttaagagatattacactggggcagtactatccggtggcttccgtacttcaccggctggacccgaggacaaagctgtttggtaccatggtatttatcatttccctgtttgttgcggacagtatctgggcttacctggctgccacggtctttctggccgctgccataaagataagccacgtacccttccggtttatggtgcggggattaaaggccattatttttctgctcttaatcagtgtcagctttaacttatttctgacccagggggaagtactctttcagctgtggtttttaaaggtgacgaaggaagggctgaagacggccggttttatgggggtcagactgatctatctggttgtgggatcgtctgttatgaccctgacgactacccccaatgagctgacagacggactggagaagagtcttggattcttaaaaaagatcggtttgccggtccatgaggtatccatgatgatgtccattgcactgcggtttatcccgatactggtggaggagacggataaaatcatgaaggcgcagatggcgagaggtgctgattttgaaagcggaaatatcattcagagggcgaagaacatgattcctctccttgtcccgctgtttatctcggcattccggcgtgctacggatctggctatggccatggaggcgaggtgctaccgcggcggtgagggaagaacgaagatgaagccgcttcattatgcaaagcgggatggcgtgacgtatctggtttacatcgcttatctggccgtgatcattgttttgagaatcctgatataaggcggtttggaagaagatgaaacggattaagctgatagtggcctacgatggcacaaactactgcggatggcagattcagaacaacggacggaccatagaagaggtcttaaacgaggcgctgacggccctgcttcatgagaaggtggcggtgatcggtgccagccggactgattccggtgtgcacgcggagggaaatgtagcggtattcgacacggagaaccggatgccggcggataagatctgctttgcgcttaatcagaggcttccggaggacatcagagtgttaaagtcggaggaggttcccctcacctggcatcccagaaaatgcaattgcgtgaagacgtatgaatacaggattttgaatcggaggattgaggttccgacgctgcggctgtacgcctatttctgttattatccactcgatgtggaaaagatgaagcaggcggcggagtatctggtgggagaacacgattttaccagcttctgcgcaccgaggacccaggcggaggatatggttcgcaccatttacagcctggatgtcgggaagacgggcgatatgattaccattcgggtcagtggaagcggatttctgtacaatatggttcgaatcattgcagggacgcttatgaaggtgggactgggagtctggccgccggagcatgtagaggagattctggatgccagaagccgtgcggcggcaggccctaccgcggtggccaggggactgaccctgatcagcctggaggaagagacggagcttcgtcctgttatcgcggctgaaaataaagagtggaaatactctctcgaccagtcggggacagtggctgagaaacagtcgtttctgaccatagagcggtgtatcccgaaagaatttgaccgccttctgttccgggtggtgcatcaggcagtcaggaacggagcggaaacggtttatgtaaatgactgtgaatccggggaacggatcgaggcgggaaaaccatacggctattacgtattccagccttcggaagaaagaaacgggtggtatgtgacacacgacgaatatcgcagaggcgccgggaagggcagcccgaaagaataaaaacatcgaaaaaaccttgattttatgggaaaaagaggttgacacacccggctgaatgtaatataatgtataactgtgacgttagacgaaaatgcttaggccaaagccccggagtgagcattttacgatatagttatgaataataacagcaatttaacaggaggttaaccaatgaaaacttttatggctagtccagcaacaattgagagaaaatggtacgtagttgacgctacaggacatacattaggacgcttggcttcagaagtagctaaagtattaagaggaaaaaataaaccgatcttcacaccacacatggattgcggcgattacgtaattatcgtaaatgcagataaggtgaatgtaactggcaagaagttagaccagaagatttactacaatcactccgattatgtaggcggaatgaaggaaacaaccttaagagaaatgatggctaagaagccggagaaggttatggaattagcagttaagggtatgcttccaaaaggacctttaggaagaagcatgatgacaaaacttcacgtttacgctggtccggaacatgatcatgcggctcagaaaccagaagttttagaaatcaaattttaataaggtactgaaaggaggaagttatcatggctaatgcaaaattttacggaacaggcagaagaaaaaaatctatcgccagagtatatttagtaccgggtacaggtaagatcacagttaataagagagacatcgatgagtacttcggacttgaaacattaaaagttgttgttcgtcagccgttagttgctacagagactaatgataagtttgacgtactggttaacgttcacggtggtggttttacaggacaggcaggtgctgtaagacacggtattgcaagagctcttcttcaggcagacgctgattaccgtccgatccttaagaaagcaggttatctgacaagagatccgagaatgaaagaaagaaagaagtacggcttaaaggcagctcgtcgtgctcctcagttctccaagagataatcagacagaacacgagtttattcaaatcccgcaggcggtttcgtctgtgggattttttaatacggcggaagtgcgcagggaggtcttatgcttcagattgccatatgtgatgatgaaaactattaccgggaaaccatcagaacgcttctcacggagtatctggaaaggcgcggtcttgagtatgcgctttctttgtttctgtccggagaagaattcgtaagccagccggaaaatgctgtgaaatatgatgttgtatttatggatatcagtatgagccatgtgaacgggatcgagacggctgcctggatgcggtccctctgttctgagacggcgattgtgtttgtgaccgcgtttcttcattacgcaccggaagggtataaggtggatgcggtgcggtttatcatgaaggatacgctggaggcggcgcttccggagtgtatggatgcggttcttaagcgaaaacggctggagcaggtggaattttcctgtgtagagggaacggtaaggctgtttaccgagcggattctctatgtagagagccggaagcataaggctgtcttctgctgtcaggggacggagccggagacctgtcaggcgtatttaaagctggacgaggtggaacggcggttgaaagaatacggttttttacgtatccacaagagctatctggtgaatatgcggcacgtgaggagaatcaggaattatgaggcggagctcgataacggggaatgtctgcctattcccaggccccgcttccaggcagtgaaggaagagtatgcagtatacaaaggagcgatgccatggggattgtgatgcggaatattctgctgtgcctgatgctggggatcggatgcggcatatactatgaaaccatcgtgccgatgcgtgtgtggcggtacaggtgggtgaaggatacggctgttcctgcatttaccctgggatttctggccattgcattgacggaaataccgccttatatcctgcagccggtgagagtgatcgttgttttgtggctggtttcgtggatttattttcagatgaaggcggtgcagagtttgattctttccgtgctgttctgtgctcttatgtggatcgtgatggccatcgtggtatcggctgtctgggcactgccgccggagtacagggggcttgaggcattggaggaagagttgtcctacagtattctgctgtgcctgattctgctgtttcattaccggtaccgaaaagggctgagaggcttaaccggggggcagtgggccaggtatggatatttccccgtattcagtatgatcgtcatcatggcaatcagcatgatgacgggaagcggtgaaacagagcggctggtagcggtatccggttttggcattctgaatgtcattgccctgtatttcatcggaagtattctggaaaaagacgccagggtccaggagatgcggctgctccaggaacgcacgcagaaccagatggagatgtaccataatatgcagaggaattatgagcggcagagacgggagctgcatgactataaaaatcagttaaactgcattcaggggctgctgctggagggccgcctggaggaaacgcttcattacgttgaaacactgaatggaaatctgcgggaaagcgcggatgtggtaaacacgaatcacgcggttgtcaatgtagttttaaaccagaaatatcagagcgcgctggaaaagaatattaccatgatcctgtctgtcaatgacctgtccggactgacgatgggggaggaggatctggtcacgcttctggtgaatctgctggacaatgcggtggaggcctgtgagaagctggaagagcgcaggatcatccggtttaaaatggtcctggaagatggggaactgattctctccgtcagtaatcctgtggcggagcctgtcatcatcgatgggaagaagattgccactacaaaaaaggatggcagaaaccacgggattgggctgcttaatgtgaatggcgtgattgaacgcctgggggaacctctgcactgagatgcgaggatggctggttctgcttttccgcgatgattcccgcggcagaatgaatgatttgagaaagaacagaaggaggcgccggaaggcgtctttttttgctgccgcactgccggtttgtgctgcggccattgttccataaagcggggaatcgtataataaagggaacaaagcgcggaaaggggagagttagaaatgaagggacttaaaaagatagtattcatggcggcagccatatgcgtatgcctggcggcatgcagcgggaagaaaagcacgggttatgcagaaacgccggaagcggcggtacagtcagcgatggaagccttgcagacactggatttggagacattcaatgctcttacggataattacgtgagcacagaaagaaactggctgggaataccggtgagaaggcgttaccgggtattcagtgagctgcagcagccggggattttggagggagcgaaagagaaggccaaccgtgcgtttgcggagaagatagtgaagaatctgacgtgggagatcactggtgcggagacggagggcgaacggtctgtaatctccgtgcgcatcacaaatacggatatgtccgatgtaatggggcgctataccgtgcatgttctggagaaaatgacggacggaaagggaacggggctgaaagaactgtttgaggagatcgcggaagcggattacgacaggggaggagtcctcccgtatctggacgaggcagaaggaagtgtgacgaccgatgtggcggtgacggtatgccgggaaaacggcagatggatcatgaagattacagacccgttgatcgaggcgtttatggggaatttcggagcaggggaattctccggggaggtgaatgcgcgtatcgaggaactggaggaagagtatgagaagaagatggtacagtggggggaagactttggaagccggatcggacagtggctggaagggatttttaattgaatagtgcttgtatcctgggccggactgtggtaaaatctattttttcctaaaattgaaagagatggactgagcatcggaaaggaactgtatggagtgggaaaaactgctttcaaaggaacggttttatcaatcaggagacggggaggagcctggccggtctgactatgatacgattatcaggagtacgctgtttcgccgtcttcaggacaaggcgcaggtattaccgctggagtcggatgattatgtcagaacgcgtcttactcattctctggaggtctccgcgatcgggaagaggctgggagaactggtgtaccggcggcttaaagaggcagggaaagacgcctggtttgagcataacccggagactgaattttcggatacgcttttgtgtgccggattggttcacgatattgggaatccgccgtttggtcattttggtgaatatgctgtccgggagtggtttcagcggtatttaggtgggatgaccgataattacgccagacggctgtaccgtgagctgttttcctagacgggaaggagccaaagcgggttgcggaccaccggacagggggtgaactataatgcctggaacgatggcgagcagctgtttggccttcttctctggtattaattgcaaaaatatgttaatatttctataagaatactgggttcggaagccggaacggtaaacaggaagcggtacaagttggctctaagccggacagaaagaaggaacaggaatgggacatttgacaacgcgggacgcctaccggaatctaagcgaccgcatcaactggtttacacagggggctccgacctcagagaccctatataagatactggaggtcctgtatacggagaaagaggcgaagtgggtggcgctcctgcctgtacgtccgtttactgtgaagaaggcggcgaagatctggcagacgtcggagtttaaggcggagcggctgctggaccacctgtgcgaaaaggcgcttctggtggactcctatcacaacggtgtgcgcaagtttgtgatgccgccgcctatggcggggttcatcgagtttgcgctgatgaggacgagaggagacatcgaccagcactatctgggggagctctattaccagtatatgaacgtggaggaggatttcatcaaggatctgttctttgccacggagacgaagctggggcgtgtgtatgtccaggagccggttctggccaatgataagacgaatcatatcctggattacgagcgggccacccatatcgtggaggaggcggaatacatcggactggggctgtgctactgccgccataagatgtaccatgcaggccatccgtgtgagatcaacgcgccatgggatgtctgccttaccttcgataatgtggcacggtctctggcgcagcatggcgactacgcgcgtctgatctccagggaggaggcgctggacgccctggaacgttcttatgccagcaatctggtacagatcggggagaacgtgcgggaacatccggccttcatctgcaactgctgcggctgctgctgtgaggcgctgcaggcggcaagacatttcagcccgatgcagccggtggcaacgacgaattatattccggagatatcactggaacgctgtgtgggctgcggcaagtgtgcaaaggtctgtccggttctggctgtttccatggaagagggggagaacggaaagaagaaggcagtggtgaataaggagatctgtctgggctgcggcgtctgcgcgagaaactgcgcggtgaaggccatcgagctgcagaggaggccggaacagattatcacgccggtcaacagcactcaccggtttgtgctccaggcgattgagaaggggacgctgcagaatctgattttcgataatcaggcgtttgccaaccaccgggccatggcggccgtgtttgcctctattctggagctgcctccggttaagcaggcattggcgagcaagcagttaaagtccgtgtatctcgataagctgctttcccttcataagaagtaagggaaagaaggtcaaagaaacggggaaaataaccgatgaaatgaaaacaacactccgaaaacgggtttcagtatccgctttcggagtgttgtgatgttaagaggtccctgccggtttcagcgggtagcagtgatgcagcagaagcttatcttcaatatcagccgtctctgcataaaaggcttcggagattctccgggcgatcagttccgcgttttgaccgtccacgtcggaaaccatgacgaggtactggcagctgctgtactgggtgaagacgtcgccgagacgaagggaatactgggtgacggattttaaggtatccatctgattctcacgggtcagcagctttggaaaatccccgtttttgtcggtcagagtaaaaagaatgatgtaggcgctctcaccgctccggcgcagccggcgttctacgaagcggtatatgcttttgaaggtatcgtaatcctggcagtatgcgccggtggtcagttcctgctccgacaattcggtgcgaatcagcgccatatcgatctcaatgcctttcctggcggcagaacggcgctcttcggctgcggtgagaaacggcttcttatttttctttcgtttctctgacagaagcagctgatcggcgcggtcaaacaggcttttataatcgtctccgggctgatacaggcttccgcatacggtgacggagattccgttgataagcggattggtcatctggattcccaaaaggcgggaccggatctgacggcaccgctcatctacaaaattctggttctgtgcaaggggcatatagataacgaattcatccccgcctacacggcccaggatatcatgtttaaaggtcatgaggcttaagattcggacgacctcctgaagaacagaatctccggtaatgtggccgtatcggtcattgatctgcttgaactggtctacgtccagtacgaaaaggacgccggtctttttctcggccagcagctggttgatctttgtctccgtagcaccacggttataaatgctggtcagccagtcgtggctggccagtttgcttagtatttcattttcctcttttaaggctgcccaatcctgtttcatatattacgcctcctgctaatctgctttaatgatacacaaaaactatgatataagtcaagaaatatagcagaaaataaattaaaaaggccatgaaaacgtatgaacagtaaattcggatcgggccgttgaaaaaacgtgatgacgaagatggaaatgaatgcgccgatatgatatactcattagatggcagaatgacagaaagggaagcggaattatgtatgataagctgacaaagaatgatattcagaaaatgcaggaagagatcgattacagaaagctggtggtgcgcagggaagcgctggaagcggtcaaggaggcgcgggctcacggagatttaagcgagaatttcgaataccacgcagccaagaaggacaagaaccagaatgagagccggatccggtatttagagcgtatgattaagacggcgcagattgtgtctgatgaatccagggaagatgagattggcctttacaatacggtggatttatattttgaggatgacgacgaggtggagacgtacaagctggtgaccaccgtgagagggaattccatgaaggggctcatcagctcggaatcacctctgggcagcgctatcatgggacacagggtgggagaccgggtctatgtaaggattaacgagaaggcgggatactatgtggtggtaaagcgtctggagaatacgacggacgacgggagtgataagctgaggagctattaaggcccgcgggaggcgagggatgaaaaaaacgcgtggtgacagaggtcttacgataaaatatgcggcacttcaggggaattactggatgctgtttggtgcggtctttacttttattgcggtatttctgctgtcccagggatttaaagcgggggatgtcggtgttctgatggcgctgggaaatgttacgggcgccatactgcagccatggatcgcggcggctgcagataagagtgagagatacacactcagacagaggatgacggggattacgtgcctcggcatcgttccggctgcggtgctgatgctggctccgggatcccggtttctgtcagcgggactgcttatggtgataatggttgtggtgagcgttcagcagccgctggttaacgcggtgaacggatactatattagccgtggaaaatccatgaacttcggagtggcgagagcaacgggctctttgggatttgcggtcctttcctggatcatgggttatttggtggcagcattcggcgaacgtgtaatacccattgccatctgtttcctgctggttaccatggtggcagtgatttcctcctttcggatggagagagataagagctgcaatggggaaacgattgaagcagcagaaccattttccggatcaggaaaaaggactggtacttccccgcgcgcacccggcagcggatgggcgctgattaagaagtacaggaggttttttctggttctgggcggcattgtattcttgtttgcctttcacaatatggtaaatacctatttgatacagattatggagcggtttggcggaaacagctctgatatgggaacctccatagcgattgccgcagtctgcgagattccggtgatggttctgttttcaaaacttgcagagaaaatcagtcccaaccgtctgattaagattgcagggctcggctttctgcttaaggcaggtgcaatctggctggccggcagcgtgctgatggtccatgcaagccagctgctgcaggcactgtcatttgcaattctgatcccggcctctgtgtactactcggatgaggtgatggaagcgcaggaccggataaagggacaggcatttattaccgcgtccatcacggcaggcgggatggtaggcaatttctttggcggaaagatcattgatgcggcaggggttccggccatgctgaccgccggtgtggtctgtgcaggagccggaatggttttagtctggatcggtgcggttccggcaaagggaaggggagaagacggtacattatgatgaaggatatgacaacaggaactataccgtcacagctgatccgtttctctattccgctggttctgggcaacttatttcaactgacctataatgccgtggactcgattatcgtcggcagatgggcgggagagaatgccctggcggcggtggggactgcaaatcccgtgatgagtattgtgattctggggataaccggaatctgtatcggagcctcggttctgatgagtgaattcttcggggcgggacgcggggagcagctgaagcgccaggtatccactacgctgattttcggctgtttcttctcggctggcgtagttcttctggggctggcgtgttcgggggcggtgatgaaggctctgcgggtaccggaagagatcttcggggaggcagtgctgtatctgaggatcgtatttctcggaatgccgtttacctatctgtataatgcagtggcgtccgccctgcggagtgtgggggattccaggacaccggtccgttttctggcgatggcctcggttctcaacggctgcctcgatctggtcttcgtggcaggcctggggctgggcgttgtgggcgcggcactggccacggatatcgcggaggcggtatcggccctcctttgcgtcgcctacgtttaccggaaggtgccattgcttcagctgaaacgggaggatctccgtgtggatggggaactgttgaagctgactctgaagcacggctccatcacagcgctgcagcagtcctgccagcccatcggaaagcttctgattcagggggcgatcaatccgctgggggtcagtacgattgcggcgtttaacgcggtgaaccgggtggatgactttgcatttacaccggaacagagtatctcgagtggtatgatgacatttatcgcccagaacaggggcgcagggaagaaagaacgggttaagaaagggtttcggtacggactccttgtggaagcggggtactgggttatcatctgcaccgtgattctgctgatgaaggagcctttgatgaggctgtttgtatcggatggagatacgaagatggtggcgcccggcgtggagtatttgagcctgatggcattcttctatctgatgccggcgtttaccaacggaatccaggggtttttcaggggaatggggaatatgtcgattacgctggtctccacgctgatccagatctccttccgcgttgtctttgtctatcttctggtgccgcggatggggatgacgggggtcgcctgctcctgcctgatcggctggagctttatgctgatggcggaagttccatattacttctggtttaaacgccgccatgagctgctaagggattgaaacaaccaccggtacgcttgagacggtacggtgtctgagggttaattgcctaaatcgccgcttctgtcgatgtaggaggtgtgaagcatctcctcggcgagagggctcagcggcttctcatagaattttttataaatttcctttatctgcggattttcatgggataaacggagcttcatctggcggtctcttgcatagaggccgtcgattcgtttctggcgcagtccgttgcctgagaagttcttatcctttggctgtccgccgcctccgatgcatccgccaggacaggtcatgacttcgatgaactgatagaatttctcaccgcgcttgatgctgtccagcaggcgccttgcattggcggtgccgtagacgacggctatatccagtctggttccggcgatggtcagagaggcctcctttgtaccggacagccctcggacttctttaagatcatagaggtcatcgggaaccggttcgcctgtgagtacagcataggcggtgcggaccgcggcttccatgacgccgccggtattgccgaagatgactcctgcgccggatcctgttcccataaacggatcgtatccggagggctccagggcagggaaatcaatcccttccgcacgggcccactgggccagctctcttgtggtgatgacatagtccatatcacgcatgccttcgattcccagcatgctgcctgcggagcacatctcctcgcgccgtatctcgaatttcttcgcggtacagggggtgactgctacgttcacaatctttttcggatccagattttcctgattggcaaaatacgtcttgatagtcggcccctgcataccgatggggcttttggaggtggagagattttccttgaattcgggataatacgtctccacaaattttacccaggcgggacagcagctggtgagctggggaatggggatattgctgcttgttaaacggcggatcagttcgttggcctcttccatgatggttaagtctgctgcaaagttggtatccagtatgtaatcaccgcccagagcacggagcagtgcaaccatgcggccttccacaaagctcccctcttccatgccgaattcttccccgagagctacacgcacagacggcgatgtggagaagatgacaattttgccgggatcgtttacggccgcttttacgcgttcccattcaggaacttccgtaatacagccgacgggacagacattggcgcactgaccgcagtggatacagatggcggtgtcgccggtcttcagcagatcgtaatagccggctaccccgatggattcggtacagaccgttttacactggccgcatttgatgcacaattcctcatgccgcataacagagggattgtcaggttcgatgggaacccggatgtcggtaaagagatgtttgctcatgtgaatatattcctcctgggtaagatataataatagtaactattactaattatagaacggcagggaaattttgtcaatctacttttgatccttatccgcctttttatgtttgcaggtattttgaaggcaatgagcaggccggaggaggggcatgtaaagaaaacgtgaagattcgggaaaagctattgtaagaaggggacggaggcggtataattttcctgtaattaaggaagcaccccccaataataatgtttccatacaacactctccccgtccgggaaccatggcagctgatccggctgtccaggtacccgggcggggactttttttgcagatggagcggaatgaggcagccgcgctgtgtgtgtgttttcttgacggaaaggggaatatccgatacaatgtagtcatctgtaactataagagacgggagataagaagatgataaagaatattgtatttgacatgggaaaagtgctggtcggctacgatgcggacagagtctgcagtcattttatggacaatgaggaggagaaaaaagcggtctgcaccagcgtgtttgtgtcgccggaatggctgatgctggacatgggtgtgatttcagaggaagaggccttacagcggatgcaggccagactggaaacggatcatgcaaaggagatggccgctctctgcctggcgcactggcatgagtacaatatgtggcctctggagagtatgggagagctggtccgggaattaaaggagatgggatatggaatctatctctgttccaacgcatcggtacggcttctggaatgctatcggataattccgggcatcgaatgttttgacggaattctcttttcggcggaggtgaaatgcattaagccgcagaaggagatgtatcagcacctgtttgaccggttccagttaaagccggaggagtgctttttcatcgacgatgtgatggtgaatattgagggcgccagagcctgcggcatggatggatactgctttgccgatggcgatgaggcggcgctccgtgcggctctaaagcgtttgaacaggaactagagtgcgtgccgcgtcagcagaatggagaccgtgaatgtacgagacagagataaaaaatatggatctgggccagctggcgaaatccggtcagtgcttccgcatgcggcccgccgcggaaacggaatgcggcggaatatggtccgctgcagcgggagaacagtatgtggaaatcatgcaggacaaaagccgctttctgttttcctgtgaggaagctgaatttgaagggatctggcgttcctattttgatatggataccgactatgaagcggtgaagcgttcggtggacccggaggatgagtacctgcaggcggccatggcctttggcgggggcgtgaggatcctccgtcaggatctgtgggagatgatcgtcaccttcctgatttcgcagaacaataatatctccaggattcgaaacagcgtagatgcgctgtgtgagaaatttggaaccaggaaaacgggcactgggctggtcctggacccgaacgaaggcgtgaaatcggtggagagaacgtataatgcgtttccggaggccggggcagtggctgcaggcggcccggaggggctcggcggcctgggactcgggtaccgggataagtacatatgggccatggcgctgaaatgcagcggtccggacggtgcggcgtggctcgatgatctgcgcgccgccgactaccacacggctcacggcatgcttaccgcggaatttggaatcggcaggaaggtggccgactgcgtctgcttattcgggcttcaccatgtggaagcatttccggtggacactcatgtaaagcagattgtgaatgcttattatccgggcggttttcccctcgaacggtacagggggtacgcggggattctgcagcagtacatgttttactataaactgaacgataagtaaggcaggggatcttatggaaaaagagatgagttttcatattctgggcatcgaagagacgaaggatgaacgcaccgtgaaaatggcttacatgcgccttttaaaggagacgaatccggaggatgatccggagggctttaagcggcttcggacggcgtatgagactgcggcggcgtttgcggcggcgccggaggaggaaggggaatccggagcaggagacgcgtcggaggaaaagacagagctcgacgagtggatcgaccgggttgacgcatgctaccgtgatgtgtacggccgcaccgatgaaagaaagtggcggcagcttctggaggatccggtctgtgacggcctggatacgtctctggaggccagggagcggcttctggtctatctgatgaaccatgtctatctgccgcagaagatatggcagctgctggataaaagctttcagattgtggaggatatcgggcttctggaggagaaatttcctaagaattttttgaattatgtggaatattacgtggaacacgagggatttatccggttcgagtatttccggcgcaggggcgcgggggaagagaatgtggacggctatctggacggctattttgcggtgaagaagaaggcggacagaaatgaattcgagggctgcaggcaggagctggacgacctggcagcattcggcgtctggcatccctatgaggaggtggagcgtttgcgccttctgctcgcggagcatgatgtggaccgtgcatcacgtctcgccgatgcgctggaggaaacatgcggcgattccatgagagacgatccttatatctggtcgtatatcggccgtgtccgttatatggaggagaaaaaggatgaggcttataccatctggacccgggtgctgaaaagctatccggattattatcaggcaaaattcggcgccgtctcatgcctgatggaaaagggaagattctggcaggcgcgggaatggatgatggagattctggagctggacgggcgggatgaagaaattctgggccggctgaaagtggcgaatgaggcgctgatcgccaggcttcgtgagaatccggagtaccacgaggagggaaaggatgttccggcagaagagggggccattgagctggcatggtgcctgttccagaacgagcggctggatgagacgatccggtacctggagagctatacgccggaaaaagcgcaggaatacagctataccaatctgtttggacgggttttatttcaggcggaacgctatgaggaggcacgtccttatttggaaaaatggctccgtatgattaccgagaccgtggacgacggcacgcaggaaaaccggaggcggagatcgagaaagggcagggccctctatattctgggcggctgctgttttcagcagggggaatcagaggctgcggccggttacgtggagcgggcagccaaagaggcggacgggcagcaggagcggatgggatatctccagtaccttgcccacattctctgcgaatcaaaacagtatgaacgggcggtagatgtctgtgatcagatgacagcagaggacgaaaattactatccggcctatctcctcaggcaggaggcgtgttatgagctgagaaaggggcagcaggtggtggatgattaccaccgggcggtaggcattttcgccggctattataagccgtatcttctggcggcgcaggtctttttttaccacaatcagtttgaagacgccaaggaggtcatcgaccgggccagggagaacggtgcagagttttccagctgcttaaagctgtatgaggtgaaggttctgcgcaacctggccagaacgaaagaggaccgggagcttcccttaaagctgtgcggggaactgatgaaggagatcgagggggaaacggacatagaggatgtttccgaggtggagtttgagacggctctccttcactgggacaatgaggagtttcatgaggcgcttttccacctggcagaggcaatccggaacaataaggaccggatgcagtaccgtctggtgcggggaaatatctatctggatatgaagaagtataatgaggcactgacggaatacgccagcgccgcggaggtctatcacgattctccttctctcttctacaaccgcggcctgtgttatgagggaaagaagatgaaggtacaggcagcggaaaactttgaaaaggctctggagctgcaggaggggtaccgggacgcctgcgagaagctggcggattattaccgggagaagtatgagaatcagtacaggcgggccgattttgatacagccattgcctatatcagccgtcagattgcggttacggagaactgctactatctggtgcaccgcggtctgatctacatgaatgccatggaactggacgaggccatacgcgattttgagaaagcgcttacgtatgtcccggaggactgggccgcgtataataacctgggctgctgttataagtatctgggccgttttgaggaggccgtaaagtactttgagaaggccgtggaatacatggaggacagtaagagcctgcttccgtacagcaatatggctgactgctatgaggcgctgggcgattaccggaaagcgattgagtgctatgagaaggatttgaagctgtttccggagtatacgtcattctggaaggaaatcggtcagctttacgcctatctcggggagtacgaaaaggcggaggaggcgtacggccatacgacgaagatggacgattattacagccgcatgggggatctgtggttttaccaggggaatgaaaaaaaggctctgcggttctataagacagggatcgaaaacgcagcggcagataagaaggcggagcggcagtctgatttaggcgaggcttatatggatcagatgcagaattatccgaaggcggtggcctggctgaagcgtgcgattggcagaacgacggatcacggcgatttatttgattatgagcggtatcttgcgcgggtgtattaccggatggggaaatacggtcctgcgagagagcatgcgaaagcggcgctggagcattttaagctgtccggggaagggacggaggaggactatttggcctatggtccctacaaaccggccagggaaggcgtgatgggctggctttatctggcgctgggagaacgggagaagggcctggagctgttcgggcagatggatcagggacaccggtgcaagggctgccgctaccggaagtgttacgaaaaattcctgttccagggctggtattatgagtcaatgggagatcaggagaatgcacttgtcatgtaccgggaggcagaccggctgaatccccattccatagcggtcagttgtgcgcttgataatctacagaagagggtggacagaaagaaatgatcataggtattgatttgggaacgaccaacagcctggcggcttattatacagaggaaggtccaaagattatcccgaacagactaggcaggcgtttgacgccttccgtggtcagtattgagggggaaggacagatctacgtgggggattccgcggtggaacgcggactgctccatccggagagtacggccagtgtttttaaacgcgatatgggaagcgggaagaagtttcagctgggccataagagctttctggcggaggagctctcctccttcgtgcttcgggcgctgaaggaggacgcggaatactatctcggggaaccggtgacggaggcggtcatcagcgtgccggcgtattttaacgatgccagaaggcgtgcgaccaagcgggccggagagctggcgggacttaaagtggagcggatcatcagcgagcccacggcggcggctatcgcctacggactgtaccagaaccgggagcacgccagatttctggtgttcgatttaggcggcggaacgtttgatgtgtccatcctggagctctacgacaccattttagaggtgcgtgccgtggcgggagataattacctgggaggggaggactttaccgctgttttggaggatatgttctttgagaaacaccgggagctggaccgtctgtcccttgacgagaagacggtccgccatattcataagcaggcggagctgtgcaagatgggatttacggagtccagaagctctgggatgcgctgcaggatcggggaagagatcgtggaatttaatgtggagctctcccggtatgaggaggcgtgtgaggacctcctggagcggatacgaaagccggtaaagcggagcttatcagacgcccatatccggctttccgatatcgataaggtggtgctggtgggcggcgcgacgaagagccccgtcatccgccgttttgtcagcaggctgtttaaaatgcttccggataccaatgtgaatccggatgaggccgtagccttaggtgcggcggtccagggcgccatgaaggagcggaaggaatccatcagagaggtgattctgacggatgtgtgcccgtttacgctgggaaccgaggtggtgagggaatgggagaagggtgtgtttgagaacggtgtgttctgccccattatcgaccggaatacggtaattcccgccagccgtacggaacggctctatacggccagtgacaatcagacaaagatacgcgtgaacgtgcttcagggagagagccgctttgcagcaaataatctatcgctgggagagctgatgatcgatgttccggctgggcgggccggtgaagaggctgtcgatgtgacgtatacatacgatattaactcgattctggaggtggaggtaaaggtggtctccagtcagaaacaggtgaaagaagtctttaagggaagcaatgtggatatgacggatgaggagatccgggaacggttcgagacgctgtcttacttaaagatccatccgagagaccgggaggaaaacaagtatctgcttctgcgcggtgagcggatctacgaggagagtattggcgagaagcggcttcatgtggaggcggcgcttcataagtatgagaaggcgctgtctacgtatgatacgggactgattgaggaggcgaaggaagagtttaaaaagtttctggaggagattgaggaactgtagagaccgggggaatgcagccgttttgctgcattcccccggtgtttttcaggttaagctgtcaattgtttctgaccgcacattcatcgattcgtctgactacgccgctggtatacggttcaaagtatttgggccagaagtgtgccgcggtgggattgatactttcataatcgacgcccagacgggtccagccttccgctttcaaggtttcaatcacgtgatttaagagcccctggtaaacaccttttccgcggtgctgcggcaggcagtaagcgccgcatatattgcggatgccgccggtttccgacacgaaggtttccgcggaagctgagagttccaggcaggcgatggcggagcctccggataaaactgcaaatatgcgtgaatctccgctttcggcccgtataagagactgatcaatctcttccggcgattgatacatgaagcaggggctttttcccatatgttcgatcagcatacggcgtaagtcccgtattttgtactgatgctcttttccaagctcctcgtaacgaattccgctggaaagcgtgagggggagcggggcggtaaaggacaacggctccatcggccggattgcatcgacgcatcgtaaaccaaaaccgcaggtgaaaaatgcctcaagcccctcgcggtcgtgtgcgtaaaggctgaccgcgtgcgacacaatcttatgttccacccatttttcggcggctttctgatacattcgcctgtaaaggaaggcccggttctctttgacggcgccatgtgcatgaaccggtgagaaggttccgactgcctccgtatggaaggcgtgctcaaagggggaacagcagcagagaaaccccgtcattttccggttctcgaatgcagctactcccagcccattgtcagcaaatgactgaagaccggggatccggctgacttcaggtaagcatgttactttcgttctctcttcgttataattagccatagccagaagagaggcttcttctatatattcccgtttaaaatcaataatttccatgtttttcctccatagtttgcggagggatttttattcccgcgtgctgtaagccggggcttatgactttccgtgtcccctcctgacactgtttaatgagagatatgctgtacttttcatgcgcgtcaactcctttcagggatgaaaattaagggatatacggatcgcttattttcattatggcttctgccgttgataaaaatggttacactgcgattttaccacaggggcggtagatttgctacctgatattagatgacttcttctccgtacgcagcagtggtaaagtcaaataatttatgctagaatgatgtcaactgattaagcctgcaaataaaaagtcaataggaaaatgaaaaattttcaaaatttattgttgattgaatttcaggtacaacaaatagaccaccgttatccgctggtctgaaaggatgtggtatcccttattctggaagagacataagatattcttttactcttccgtaatagattcgcagaaacttattggcgcctgcggtcatgtagacatagtaaggctttccctgggcacgtttcttatcaataaacgcatatacagggtcatcctgcggttttgttttgatgagacagtccatgacctggaataaggtttttctaagggaagatgagccacgtttggaagttggaacacttttttgttcataggttcctgattcattgacacctgggtctacaccagcaaatgcagtgatagcccctttatgggagaaacgtgtgacatctccgatttcagccataagctgggggccaagagacggaccgacacctttcattcccataacgacgggatattcaggcagcttggcggctgtttcattcattagggtgcggagttcttccacggtcttggaagcagtgtttaattgttctatggcctgcttcacgatcagcttggttaaatcatcttttggaagtacaggaacaagctccctggcagctccatagatttcttcagctttatctctgctgaagttgtacttcttacgtttgcaccatttctgataatggtcaacaaatgcgtttaatgacattttacgaacacagtccacatgccagtatgcagcggcaaaatcaacccacttctggctgccgtcctcacgggcggggctgtcaaagtaagtattaacccccgggtaagtctgatcaaggataccgatgaggttattcttcatagctgttttgtgtttcatatagaacccaaactgacggttcatagtctttaattgattgcgtatttcgtccataagactatattgtttcaattccgtccaactgtcaagagtgtaacgggctatttttacagcatcagctttatccgatttcactttacggagagaattgtctccgaaatccttaatgagtttaggatttatggcagtcacaaaaagacctgccagagagagttcacgggccagaggctcgtaatagtggccggtgtgctccataacgatgcgggattccccttcgatggatttgatctgttgaatcagagattggatgttaccagatgtatgcttgatttcaaagggcgaggaaacaatttccccataagggcgaagaatagcggccatgcttttgcctttggatacatcaataccaactgcgttcctgttcataaaattgtcactccttaagattattgcaatggataagtaccagttttactcattgcctattccatctactgtggtgtgacacgaacgtaccgaaggcagttcaacctgcataaaacgaacgctgcgaatgaggagctggttatcagtcttaattacggacgcgaggtccaaggaggaaaccgatataccgattgctccatcattataacagcttaagcaacaagatggataattccttactggctgtaagggatattaaccataaatacattgtagtaggaggaaaaaacgtgaatcgaattgagaaagtgcgggaagctgttgatgctgttcttttaaacgtagccgacgacgctgaaagaagatgcggatatgcacatctgtacggggtctcccaggcctgtgtcctgatcgctttaaagagaggtgaaaatgccgagctggcggcgactgccggaatgcttcatgatattcatacgtatgctgccatggatctccgggatcacgcgcataagggagccgccatggccagggacttgctggaggccatgaagtgcttcgaggcaggggagattgacgtaatctgcagtgcagtctatcatcacagcagcaaagagataacccacgcaccgtttgacgaagtgttaaaagatgcagatgtgatgcagcactgtctttacaatccgctgtttgatgttatgaagcatgaaacggttagatttgggaagctgaaggcagaattcggattggcttaaaggaaaggaaagcatgcttccggcagtgatacagaggaaaatactgaaaaatagctaaaaatcccctcgggattttgtgatgtatccgtattgtgaaacagttccataaatggtatgataatacagaagaaaccggcgctgtgatgatgtctgggccggaaattgatgacagagataaaaaggagtgggaaaatggcaagtatcagagaggtggccagacttgcccgggtggctcccagtacggtctcccgcgcactgaacgggagcggatatgtggcagaagagacgaaggaaaagatcagagaagccgtggatgaactggattacgtgccgaatcaatggatacggaatctttatcagcagaagacgggaatcatcggagtcatggcacctgagatcgtccatccttatttttcgtcgctgtggagttttctggagctggagcttaataaatacggatataacatgatgctgtgcaatacatccggcaagaaggacattgaacggcagtacctggatacgctggaacgaaacctgtttgacggtatgattgtcggggcggcctttcttccggataaatactatgagcagattcaaaaacccatactgtccctggaccggattatccctggaattcccctggtgacgtcggaccatactcagggcggctgtatcgcggcggataagatgctggagaagggctgtaaaaaggtgctgaatttaatcgatccgcaggcgaagaccgtggcttcatcccgcggcggattaagtttcatcaggaagatgcaggaagcgggggcggaggtcatcacggaggagtttctgtgggatgatgttatccactaccccagaagcattcagcggacgagagagattctggcagaatatccggatttagacgggattatggccaatgacctctgcgcgtcatcatttttgaagaccgcgcgggaactgaataggaaagtgccgcagcagcttaagattattgcgtatgacgggacgtatattacggattttaactacaggacaatcgcgtcgatccggcaggatgtggctctgattgcgagggaagctgtccaggttctggtgaagctgattaatggacagcctttggggaatgaggctgtctacgtgcctgtgagctataaggacggagatactatttaggagtgaaataaagttttgatttttactgttgattggatcaaggggaatctgattggaaccgcgtctgaccgggaaccgaaatttttcggaggcagacgcggtttttagtacaggaggaacggcattagtgaaacacagagcaggggtgccgcaggcgatatcctgctccgtgacgaagatacagccgcaaaagcagctgcctccgttcataaaactggcctttttttgtaaatgtgcaataaaacggcacttcctatttggtgaaaatgatgattataggaaaaatgtgaaaaagtacttgaaaaaatactttgaaagttgtatattaagcacatggaacagttccacacattgtggaactttaaaaataggaaaatatggaacagttccatattttgaaggaggatattttatgaaggcaaaaagaacagcggcactcggtctggcagcggtaatggcggcatcacttctttccggctgcggcgcagggggaagcaaatcagcaaaaacagagatcacgatttatcagagtaagattgaagcaaacgagggatacaagaaggcgatcgcggcctatgaggagtctcatccggatgtgaagatcaatctggaggcggtaaccggcaacgacttcgcagcttccttaaaggcaaagatgcagtccgatccgccgactatcttttccgtgggcggtttccaggatttgaaggattacggcgatatcctggaagatatctcggatctggaagtgcttaagaacgcgctgccgggaacgacggatatgtttactaaggatggcagggtgcttgcggttccgctttatatggaaggctacggattcgttgtgaaccgtcagatgtttgaggacgcgggcgtcgactttgaatccatgatgaccttcgagggcatgaaggccggcttcgatacgctgaaggcaaagattgacagcggtgagatgaaggagaagtatccgaacctggaggcggttatggagtatccgaccaaggaactctggatcgcaggcgatcacgatgtgaatgtggcgctgacccacgattttgacacggcaaaggctgcttacgactccgaagttcttccgggcaccggttttgccgactataagacgatggttgatttccaggccagctacaccaccaacgcggacaataccgcaaacttaaactccgtcgattacacggcttccctggaaggcggactggcgattgagcgcgtggcttccatcaagcagggcaactgggtagctccggcggtagagaccacggatccggaagtgctggcgaagctggatatgcttccatattcggttccgggatattcagacggcaagtattttgtaggcgtatccggttactgggccatcaacagcaaggttaccgacgagcagaaggcagcggcaaaggatttcatcaactggttatattccgacccggcaggacagaagatcgtggtggaagactgtaaattcgttcctccgtatgacaactttggtgacttaaaggccggcgatccgctgtctcagaggatcatggatgccaatgaggcaggagataccatgaacggctgggtatacagcggagctcccaatacatggggacagcaggctgccggtgttgaggttcagaagtatttagcgggacaggcgacctgggatgaagtgacggagagctgtataaagcagtgggcttccatgcgcgaatctcagaaataggattacccggaccggtgatggcagtgatttatgcagggggagaggcagtttcctctccccggacaaggaagaggaaggtggaataatgaaaaagagcaaagcaagattctggatatttctggcccctgcattgatttctttttccctggttgttctgattccaatgctgattggcttcttttacgcctttacagactggaatggaatcgtgggaagtgaaattacattcgtaggttttcggaattttattgaaatatttacgagagacagttccttcatgcatgcgttcggctttaccgcactgttttccatctgcgcggtgatactggtaaatatcgtgggatttgccctggcgcttctggtgacgcagaagtttcgcggcgcgacgctgcttcgcggaattttcttcatgccgaacttaatcggcggccttctgctgggctttacctggcagttcatattcgtctccatcttcggggccatctccaaggcaaccggatggcaggcactgaacggatggcttgccgacccggtcaccggatttgcgggacttctgattctgacggtctggcagctgtccggctatatgatgattgtatacatagcgcagattcagcagattccggaatccgttaaagaagcggcccgcatcgacggagccgggtttaaggatatgttaaagagcattattatgccgcttatgatgccggcgtttacgatcggtctcttcttatccatctccaattcgtttaagatgttcgatcagaacctggctttgacacagggcggtccttataaatcaacggaaatgctggcgctcaacatctacaattcggcatttggagccaatgaattcggatttgcacaggcaaaggcaattatctttatgatcgtggtggcggctatcggcgtgacccagctggtgctcacaaagcggaaggaggtagagatgtaatggcagagacaaagaatagtaagcgagattccaaagggatacagcgtattgtgatgggaattgccggtctgtttctcggctgtctcttcctgttcccgatctatattctggtactgaattcatttaagaatacgaaggggatttttaccgatgtcatcggattcccgaatgcggctacctttactctggctaattatcccaatgcatttgaggcgctggagtatatcagatcctttatgaactccctgatgatcactgtgatcgcaacggtactgattctgctcatatcggccatggcggcgtgggttttggttcgctataagacgaagaccagcaagataatcttcttcctgtttgcggcctccatgctgattccgtttcagtgtgtgatgcttccgctggtgggatttgccagccgcatcggcattatgaatccgcagggactgatctttatgtacatgggcttcggcagcagcatgtccattgttatgttccacagtttcattaagaacattccggaggaactggaagaagcggccaccatcgacggctgtggttccttccggctgttcttctccatcgtaattcctcttatgagaacgattttgatcacagttgcggtgctgaatgtgatgtggatctggaatgattacctgcttccctccctgattatcaacaagccgggctggcagacactgccgcttaagacttacctcttcttcggtcagtttgcgaagcgctgggatctggcctctgcgggcctgattatgtgtatcataccaattatcatattctatctgtgctgtcagaaatatatcgtaaaaggcatcacagacggagcgatcaaataaaaaagttactgttaaaaggagaaaactatggcggcagaatggtggaaaaaggcagtagtctaccagatttatcccagaagctttaaggacagcaatggagacggaatcggagatttaaacggcatcacggaaaagctggattatttaaagaaactgggagtggatgtgatctggatcagcccgatgtattgttctccgatggatgataacgggtatgacatctctgattactatcaggtagacccgatgtttggcacgaacgacgacatggaccggcttctttttgaggcaggaaaacgtggtatgaaggtgattctggatctggtggtcaatcactgttccgatgaacacgagtggtttgtgaaggcgaagcaggacccggactgtgaggaggcgggatacttctactttaaacgtccggaggatggaaaggagccgaacaactggaggtccaatttcggcggttccgtgtggacggagcttccggatggacggtggtatttccatacgttttcaaaaaagcagcctgatttgaactgggaaaatccgaaactgcgggagaaaatctatgagatgatcaactggtggctggaaaagggcgtagccggattccgggtggatgcgattacgttcatcaagaaggacttaacctttgcgtcgcgggagacggaggatggccttcgctatcccattgaaaatctgacagactatccgggaatcggggatttcctggcagaaatgaaggcaaaatgttttgaccggtacggctgcatgaccgtggcggaggctcctggcgtgagcggggacacattccgcagatacgccggggagaacggatatttttccatgatctttgattttacctgggagaacatggaaggagagacggacaaatcttccgtggaggctgtggaacgatggaaacagcggattttggaaagccagcgttttaccagtgaggcaggctggagcggcctgttcctggagaaccatgaccagtcccgctgcgtcaataaatacctggaaaaggatcagattggatttgcaggcgcgtcggccatggcggtcatgtatttctatctctgcggtaccccgtttatctatcagggacaggagatcggcatgaccaatgcagagtggaactccatcgaggagatggacgatgtgcgggcaaaggggatgtaccgggaagccctggaacagaacggtgatccgcagaaggtgctggaatacttcggggaactgggccgtgacaatgcgcggacgccgatgcagtggtgtgacggaaagaatgccggttttacggagggcgtgccgtggctgaaggtaaatgaaaactaccgggagatcaatgtgaaagcacaggaggaacgcggggattctctgctggctttttataagaagctgactgcgctgcgccatcaggaaccgtatgcatccgtattcgcagaaggcacgatccgcccggtgcttaaagaactgcctgcagtgattgcctatgagcgggaatgggacggacggatcgtcaccgtggccgtgaacttcaaaaagacagagcaggagatcccggttgtcgaaggcaagtgtctgctgagcaacgaaggagagttacagcagatgggagagcggtatttgctgaaggcttatcaggcagtggtgtttgatggaatgattaaatagaggctgggacggaaaatcccgtctgatacagaagaaagtgcggtccattatcggacagcactttcttgcgttcaaaccacttcaaactgtactttctggttccagaaagcatcttttcggcagtatctcatcagaagaagccctgtgacaacaagacatacggcttcggacaccaatggagaccaccagattccggcccctccaaagagtctggtcatgacgatcaggcacccggccatcaggacaagaccgcggccggcggagatgatgagcgcttcggcagcgcgttctacagaggtaaagtaaccgctgactgcaatgttgaagccgaccagcaaaaacgaggttgtaaagatgcgaaatgcagtcacggaactgtcacgcagagcctgcagctccgggccgatataaatatttacgataccgcgggccaggataaaacaggcggtaaacgacaccgtgcacattgctcctgcagcaatgagactgtaccggaacagcgatctgcactgatccagcctcttctgcccgtagtaataactgattaacggctgtgctccctgcgcgattccggtagctgacagaacaacaaggttattgacgtaggagatgatggtgtagctgaccagcgcatcctgggttaaatacatcaggattacctgattgaaaataaaggttaccataccggaggacatttccgtaacaccggaggaaaaaccattgcgcacctgacggaccaggattccgaaatcaggcttaaagcgtttgaagcttaataccccttttccgctcaggaaatggtggagatacagaacgatcacggaggcctgggagagactggttgccagggcggcaccctgtatgcctttgtggagcaccattacgaacagccagtccagaatacagttttctacggcgccaaatataacgatctgagttgcctttttggggtaaccgtcggtcttcaataaaatttcaaaggagtaggagagcagatacacacaggaaaacggtgcaatccaggttatgtattgaatcacgtaatcagcagtctgctggtttggagcccctaaaaaacgggcaaaggactcacggttcatcatgacgaaacctgcaatcaccagtgaaaaaatcacctggaggactatattttgggtaaatacttcacaggcacgctgatggcggttttctcccagcagtatggagacgattgtggaagctcccactgcaaaaagaagggaaagggcaaagagaaacgccataaacgggtaggagagattgactgccgtcagtgcgatttcgttgacaccctttgcgacaaacatgccgtctaccatagaataaagggaataaacccattgggccagaatggatggtacgatataacggataaagttgctttttaaagacctgccttccagattcataataaaacctcgcttttttaactaaacctatttataaagatcatgtcaattatgacaaatatgattttagtataaaccctggtattgtcccagagtcaaggggaaaagaaaaattgcaaaattgtgtctaaaatgtggtaatattttgtaaaatctgaaattatgtgataaagtaggaagcagataaccaattgtaccgtgtgaagatatcaggggggcttatatggaaccggatagagggaaaaagcgaaaagcaaaagagaagtactacaccattggggaaattgcgaaactgtatcatctgggagtggatacgattcgatactatgaggaaaaaggaattttaaaaccgaaccggggggagaacggttaccggtattatgacagccagagtatctggaggatgaatgtaattaccaatttaagaaatctcaatttttcagtgagccggatcagagattattttcagaatcatacggtggaaacgacacagatgctgctttgtgaggaactggaagtcattgctgaaaaaataaatgagtggacaagcctgcagaaaacagtccaggagcaggtggaaaccatcaggcaggcgcagactctggagatcggaacggtaagatcactggaattagggccaagaaaagcgttcgaaatccggaaggattacagtactgacgaggatatggatcttctgatgatgaagcttctggaacagaatcacaggaagatttatatgatcggaaataaccgtatggcgtctgtcatgtcagaagggaaccgtgacgcgctttttgagagcgccgtaatgtttgatgacgacggcgatctggtaatacccggcggaacgtatttatccgtctgttaccgcggagtgacagacagcagcaatcaggcggatataatcagagactatgcggcagagcacggaattgtactgaagccgccgtttatggatctgatgtggattgatgtgcatatatccgcggatccggaggaatatatatcggaggtgcaggttcgggcggagcagcaggaaaactaaattaggtttaatataaatcgaaagcaaggataaaagcctgccgcagacatgtttgaaattctaaacatacctgcggcaggcttttagatttattgcagatgtggattaacatggctctaagactgcagccggaatgtatctcgctcaatcaattttggagatacaatgatatggtgagcagcatcctttccatccaaaaggctcagaagagtattaattgcattcgtacatacaaactctctttggttgtcaaccgttgtcagacgaggcgtgcaggcaaaagcaaagtcagagttgttgaatccaactaccggaatctgtaaaccggcagcattcagtgcctgaagtgcgccaacagccaggagatcgtctgcggaaagaacagcgtcaattcgtcgtccattcttgattaaacgctcaattttttgctgcgcatccagaatttcattgctgtaaataggaatggtcatacatttggaagttgcttttaaattaaatttattaataccttccagaaatccatttcgtttctccattgcacagaaggtagtgttgtcctccagataataaatatgccgacaattccgcttatacagttcttcgaccaaattgcagatggcgcttcgttcatcacaacgtacgctgtaaacggttggaacatctacgaagccatttaaaataataagtggaacttcttcagaaatttccctgtagacctctaaatcatttgcatccccataagaagaaccgatttctataatcgcatccacctgctttgccatcaaaaattcaaaatgcttccgctggtaggggcgatactctccggaacagcagagaaaagaactgaagccgtgttcgcgcagctgtttttccagtaaagagaggatttttgcatggttgatatcgtccagttcggaacacaggatgccaatacttttagtcgatttggaatttaaacctctggcaaaaatattgggcgtataaccatggtctgccatgacagacagaaccagctcgcgcttttccggccgtacattaggctggttgttgattactctggagactgtagcaacagatactccggatagctttgctatgtccttaatattcataaaatatataattcctcacatttatttccgcgggcaacgagaaagacggacacgctggcgtgtacatttggcgactgccgcgagggatttggctagaatttagaatcatccatattataccatgtaaaaaataaaaaatccagagataatattgataactggttacattttgttaataaaatgaatgatagataaaagaggtaaaataaaaatatatggtaaaaatgcatattaaagtacagtttatcgtcaaatataataataaaatatacaaaaagtgttgacaaaataaaaagatagttataaaatacaaacatagctaaatgaaactagtttcattaaatatcaaataaagtaaaaaagaaaaagagaaaagtctcagaaacctgggggaaggaaggggaattgtggcgatcaatattacaagaaaagaagatatcatgctgaaattttgtgatgggtacgctaaaacggaggtactgaaagatgcttatcctctggtgaggacgtataaatgtctgctgaaggcgggatatacggtggaaccggaaatatattcggataagatccaggtgtttagttttacaagtggtactggttacatatgcggaaagaagaaagcttataacattgatgaactcagcttttacattcctgattttgatcgggagaagttttcgttttatgcagcagaagatatggagattacactgtgggttgttgatatgctggaatcggataaagcagcatatgaagatacacacatggtgcttcccagctttaaacgtttttcggaatgcgagccttatgatcagagctgcaagggaccacataccaaaagctggacggttatagctgacggtaatctggcaagggtgctgatgggggtcgtaaaagcggaaggtgagggaacgaaagaaagaggacacgcagaggtggcgcagtggaattattgcctgccgggctctgactttcattttactgttgagaatgaaacggtaaatcattatgaaggagagtttagctatgtgacggctggcctggatcattctttgatcgcggatcctggtaaaacggttttttatatttggtttgaacactgggtggaagaaaaaaagatcaatccgcaaagctatgaatcaaattaatataagtattggaaggagaagaaaagcaatggcaaaggtgttgatttccagaggtaaagattacaatccgacagattacgtgaatgggctggcaagagaggaagttctcccgggagtatgtgatgagatcacaatgcatcgctgtactttaaaggcgggaacagcattgaaaccggctgtatatgcatttgaagaaaaaatgcaaattttcctgtttgtcatgggaaatggttatattacgacagatacagaggcctatcggatcgatgatcgtgctgtgtttgtaccgaatttcaataaggacgagatactcatcaaagcaggtacggaagatttgtcctatattcacattgtgggtgagatgaccagatgggatcaggaaagaatgaaaattgatcacattgttctgccgcgttttcgcctgttaaaagactcttgggaatacacagaagggtttacaggggatgctggttctaatattaaaagtcatatggttctggaacatgaatatctgggacgctacagcatgggatggaactgcggaaaaggtcctacttttattggtacacatgttcatgaagaccttcttcagtggtacttaaatatgccgggatccagttttacttatcatgctggtgatgaaacggtaagtgtagaaagcagcgatatcacatttaccgaaattggttctccgcatgggagtgaagcgtctgagggacagtgcattgattacgtgtggtttgagctggcaatcaacggatatatccatgatgacgatattcttaaagagcatatagcgaatgaatagggtggtgaagggatcgtatggcagcattgctggaagtggaaagcctgacaaaaagttttggagagaatcaagtgctgagaggcgtgaatacgaaggttgaaaaaggcgaggtggtttgtgtaattggtccgagcggatcgggaaagagtacatttcttcgctgtatcaataaattggaggtagccactggggggcatatttattttgaaggagtcgatatgacgggaaaagggcctttggtggaccagaaaatccagaagcttgggatggtgttccagcagtttaacctgtttccccaccgaaccgtacttgagaatataatgatggctccgatcaaggtccaaaagaagcaaagggacgaggctgaaaggcgggcaaaggatctgcttaaaattgtaggtctggaggataaagcggatgcttatccgggcaggctttcgggcgggcagcagcagcgaattgcgatcgccagagctctcgcaatgaagccggatctgatgctgtttgatgagcctaccagcgcattggatccggagatggttggagaagtattggatgttatgaaagcattggcccaggatgggacaacaatgattgtggttacacatgaaatggggttcgccagagaggtggcagaccgggtggtgtttattgatgaaggcgtgatcacggaagaaggagcgccgaaagaatttttcgccaatccaaagaatgaaagattacagcgttttttaaagaaagttttatagtatacaaatgggggatttactatgaagagaacagttgctgtattattggcggtaataagtgcgttatcgttggctgcgtgtggttctaaaacgcaggtaaacaacacaggaagcggggatactgataattcgctgcagacggttctggaaagagggactctgcgtgcgggcgcggaaggaaactggaatccgtttgtttataatgaccttgctacagggaatcttgttggatatgaggtcgaaattgtagaagagattgctaaaagaatgggcgttaaggtagaatggagcattgccaatcaatgggatggtgtaattgcaggtttgcaggcgaaccggtatgatgttgtgttttgcggctgtactctggcaaatttagaggctgcacctgactgtgtaggaacaattccttaccgtgaggatccgattgtattggtgactgcagaggacaacaacgagattaagtcctgggaggatttaaagggaaaattgagtgccaacgcactgactggggattatggtgcaatcgccaagcagtatggtgcggaattaaccaatgcatcattggaacaggcgatggaactgattgttcagcatcgtgtcgactgctctgtgaattcacagattgcgatcaatacctatatggcagaaaaaccggatactcctgtcaaagtggcggcgaaatatgaataccccacgccagaggaagcctatagctatggcatgattctgaaaagtaaggttacactgactgaaaaaattaatgaaattttacaggaaatgttggatgatggttattgccgtgatttggcagttaaatacttcggccaggacgttgcggataatatttccctgtatcaaaagtaagggggactggaatggaacgaattatacagcttttgataagttctttttggccgctgatgaaagcggggctgaaaatgacggtaccgctgacgttgatttcatttgcgcttggcatgattcttgcttttatcactgccatgtgtagaatttcaaaaaataagctgctatccaagactgctcagttctatgtctgggtaatacgtggaacccctatgattgtgcagctgttcgtaattttctatggtctgccgaaagttggaattatgttttctccgattgtatctgcgattatcggtctgacaatcagtgaaggcgcgtatgattcggaaattattcgtgccgccttaacgtcgatacccaaggggcagtgggaggcctgccatgcgctggggatgtcgaagtttcagactttatccaatgtcattatcccgcaggcagctcttattgccgtgccttcgctgggaaatatgtttattagtctggtaaaggatacgtctctgactgcaatcctgacagttcgagaggtattccagatcggccaacagattgttgctgttacctttgagccgctctggatttatctggaggttggcctgatttatttgatttacagtacggttcttagccagcttcagggagttcttgaaagaaaactcggtaagcatatgctggtcaaagatgaaaagtaatgagtacaggattatcagacataaggagatggggctgctgtggtatgttcagcagcccctgttttaaaaaaagagggagagcaaagtgggaaaaatctgtttggaaggctgtaaccggcattatactagagtggacttccgggagttttgccgggatcagattcgtttcggaaaaaaacaggtagaaatatggggggcagtccctcagctttttatcgatcatcatggataccaggatgcggaaaagatgaaggcaatactggatgattacgaccttgtctgcagtacatttacacccaaaacatatcgctacaatctgggaagcagcagccctgacgtgagaacatggacgctttcttatttcaaggagtgcataaaggctgctgcagtacttggcgcagataaaatgcttatttatctccctgctgtgaccagagacggggacaggaagggggctgaagagatatttgctgaaaatgtgcagagtctggcggaatatgcagctgattacaaaatttcacttgtggtaggggggctgaatgcatttgcagaagacctgccggaatttttaaaggtgatgaaaaaaataaatcatccttctgtgaactgcttttttgaaacggaaaatttattattcagtaaatatgaattagaagaatggcttgctgaattaaagactgcactggttcatgttcattttgcagatgccactgaaattggaagctgtagaatagggactggctgcctgccgatgcggcaatgcctgagggatatcaggaagagtggttatcagggtggtttaagtccattttttacagaattttcctgtgaacagaatcctggtttcgttagttcggagcatgaaagggctttaaaaggattattggaggaggaactttagggtgctgaaacgagaacagattgcagggatgaatcaactgtatcgattttattcattcgagtattttttaaattgcatggaagcaacaggaataagaagcctggaactgtggatgggatctcctcatttttggatcgacacaacagggtatttccaatgtctggaaaagaaaaagcagatttgcggccatcagcttcatgttgtaagcgcgtgtgtcccgagtatggcgtaccagtatcagtatgggcatggaaacaaggagtatcgggaaaaatcttttcagtttttttcaaatggaataaaagcagcggcggctatgggagcgaaagtggttgttgtaaattctggcagctgtgagtatggtgttccttttgaggaagcggtaaaaggcccggcagaacttttgaaccggctggggcgagtggccgggcaagagggggttaccatggcaatagaatcgctgactgcagatgagacgaatattgcagataatctgaaacatacgaaagaacttatcagacaggctgatacaccgagcctgaaagcgatggctgatactgtagcgatttattttgcaggggaaactttagaggaatggtttcaggcttttggtaaagatctgattcatatgcattttattgacggatttataaagaagcgtacttacgaccatcttgcctggggagatggagaatttcctcttgcggaaatggttcgatgtatggaaaaatatgaatataccggatatcttactcaggaattggagtatgaagcttattatggaaatcctgcggaggcggagcgaaaaaactggaaggcgctttcgggtacgacgttgtgcaattaatggtacaactcagttcgtgaaaatgaaaaatggaaaattatgctttgcaaaaggtggtgagcggtcagtgcgtgcttgtaataaaacgatcgatatgacaacgggatcgtcagtgggctgtattatgtactttgctctgccgataattttgggaaatctgttccaacagttatattctttgacggatgcggttattgtcggacggtttgttaatctgaatgcgctggcggcaatcggaggcacaggctgggtgcgctgggctatattgggtgtctgtatggactgtacccttgggtttggtattgtggcctcccgaagaattggtgcaggagattggaacggatttaaagaggtgctggcagctggcgttgagtttgttctggcggccgggttcttactgactctgtttacatgcctttctcttgattttgttctggaacttctgcacattccggaaaatatctatgaagatgcaagactgtatctctggtatgcctccgtttcgattccaattgggcttatctataatatgacctgtgcgtttttgcgggcagtgggcaacagtaggggaccatttgctgcagtggtgctttcgacgttgataaatgtttctcttgatctatactttattgtgggcctgcgctggggagtttgcggggctgcccgtgcaactctgattgcacagacctctgcggctgtttttgtattgtttttggcggtgagacatgaattgtttcaaactacgagaaaaaactggaagtataatccgggcattctcagagagactgccggactttggattccgatgttttttaacagtattgccatttctgcgggaggggtgattgtccaacgctatattaattccagtggcgcaattgttgcggctggaattgatgctggggaaaaaatctattgtttgctggaaacagtagaaaaggcagtctgctcggcgatcagtgtttttgtaggacaaaatctgggcgccatgaaaattgccagaatccgtaaagggatgaaaagtatgactatatttgcgttctttttttctgtgtggctggcctttgtcttgactgtgtatggagattctttgatcggactgtttctgaataaaaatcaggaccctgcggatctggaaggagcctatcgagctgccagagtgtatttaaacgtacagtgtatttctgtcttttttatggtgcccatgcatttttacagaggagcagttcaagctcttgggtatgcagtgtatcctatgatagcagcgtttctgcagattgctgcaagatggattacggtagcgctttttgttccggcgctgggactggttggactatgcctgcctgatggtgttgctgcgcttgccagtttgccggttgtagttattccatattttgtatttatgaggggttgtaaaaaatgaagttgatttaactccatttttacagctcccttctgtttttcgaaacagataaggaaaaacgctgtcttctctgttttgcgctataatatttcccggtattatcatgtatggcagcttaattttactacaaaaagaagaacgcctccagattctgtacctgaatgcgttcttctttttgcgatgatataaatgttaaaaaaataacgtccacaaatgacaatatcttgttatatttgcataaagaaacaagatttttacaaaaaaattagtgttataataataaaaaataaaaggaggacctggaaatgaagagctttgaacagaaaatatttccctatcttttactggctccgaccatgattattttcggcctgtttctgttttttcctgcgttgaacggcctgtggatatcgcttacgaaatgggatggcgtaaatccccaggtgtttgtgggggtgaaaaactatgtgacgcttttcggggataagagcttctggaactcatttgtgagaacgctggtctttacacttgtatcagtaccatctgtctatgtggcggctcttggactggcggttctgctgaccggagggattcgcgggagcaatttcttccgggcggtgttttactggccgaccatgatttccacgattatcgtcgggcttacgtggcgcttcttgctgggtgaggattttggactggtgaattacttactgaccgcgatggataaaacgccggtcaaatggctgactgatccgaacaatgccatgggagtagtgatctttgtaactgtctggagtatggcgggatactacatggttatgtttgtgtcagggatcaaggcgatctccgagacgtattacgaggcggccagaattgacggagcgggtgcgtggcagcagtttaagtttattacgcttcctcttctgaaaccgaccagtcttctggtactggttttatctacggtatcgattatcaagacgtatcccctcgtgtattccctgacccagggcggtccggcgggggccacgaaattcatggtgcagatgattcaggagaccgggttcgagaagaacaagatggggtatgccagtgcgatgaccatggcgctgttcgtgatactggcgctgtttacagtgattcagtttaaactgaatcagggaggtgagcaggatgcagactaagacaaagaaaatctgtgcagcaggacttaaatggatacttctgcttcttttgacctttttgtttctgatgccggttatttgggtgatctgttcttcctttaagagcgtcggtgaactgttttcctggccgcccagccttttagggaagaatccctctctggataactacacaaaggccatggcagaaggccattttggcgtttacttcttcaatacggtatttgtcagccttgtagccacatttctgacgattgtagtcaacgtgatgagtggatacgcctttgccaagtaccatttcaagggagataagattctgtttggcattgtcctggcaacgctgatggtaccgctggaagttattatgatacccattttcaaggtgattgtggcgactcatttatacaataacttgtgggggcttattattccggcagtcgcttccccgactgcggtatttctggtccgccagtattatgtgggaattccggatgcgtatatggaggcggccagaattgacggtgcatcggagttaaatattctcttgaaaatcatgcttcccatggcgaagccggtcatatcggttctctgtatcttttcctttatgtggagatggaacgattatctgtggccgaagctggtcatcaacggaaaggagcgctataccatacagctggctctggccaactactcgggtgagtactctgtggactggaacagccttctggccatgtctgtaatttccatgataccggtcattgttgtgtttgtcacgcttcaaaaatatatcatcggcggcatgactgccggaggggtaaaagaataagaggaggggatgctatgaagtatttggaatatccgctgtttgcggaagggtatgtcaaccgctttctgactgccggggtctttacggaactccagcagtttgataaggcgacgctgcacggccgagtcaatgaatggctgaaaaagggctttgcaattcatgaaaatccatgcagaaaagagtttgtcagaaagagacaggagaaaaagcctgattatctggaacttgacggagcagctgacgggaaaaaggtggaagtcttcggacagacccttccgctggtaccctatttcccgttcggcaataccggcgtggatgcctcgggtttctattacaggccgacctggctgcgtatgtacaattacgttcttttggaagcggaagcagacggtgatgtggaattcgaactggagacctgcggcggagctgcggtatgggtaaacggaacatttgtcgcggactttaccccgtttacaagaaatatggtaaagaggacaaccatagttctgccgcttaaggctggaagaaacaggctcctggtctgtctcgatgatctggcggagcgggataccgactattatttccgtatgaagcggctgggagacgcagcgcttacgatgctggtaccggtgcgggatgaggtggatccgtctgtcgtggggcagctggagaatatgctggaacagatgtattttgataaagaggcgtatatcagtgagatggtaaaattaaatattaccaatccgttttctgatccgctgtctgttacggtagcggttgctccgggagaatttattgagaagatggaggggcaggaaagcctgatccgtactttccagtatgaaatggggccggaccagaaggctctggagcttttccattcggatgaacttccgccggggtactgctactttacagagtgcgtggatcatcagggtatttccttaaaacgaaaaataggaaatcaattggtgagaaaggaatttttagaatatcatgaaccggatctggaggagagaaaacgccatatcctgcgtgtgattgtggagtatgcgccggaaaatacatacaaggctgcggcactcttaacgctggacggcgacacggaagcggcggagaggattcttttggaagaacttccaggtgtgtgggcgagaaaggactgttccgattttcattttattattatgttgtacatttaccgcacctttcaggaacgcttgtcggagaaaatgcgggaggagctggaaaaagccatgtgcggcttccggtactggatcgatgaaccgggggacgacgtgatgtggtttttcagcgaaaatcacgcgcttttattccactgctgccagtatctggcgggaagtttcctgccggacagaatttttacctgcagcgggaaaacagggagagctgtaagcgccaggggagaggaactacttcgggaatggtttgaaggctttttcgaggagtttattaccgaatggaattccaatgcctatattcccgtggatgtgctggggctggggacactctataatctgacggagcctggaagcgagttccatcagaaggcgaagagggcactggacatgatcttctactcgctcagagtaaatgcacataaaggggccgtaatgaccagcttcggccgttcttatgaaaaggagatgaaaggaaattacaatgcgggtacgacgtcccttctctatctggcctatggagacggatatttaaacagggcctgcaacggctgcattcctttggctctcggagattacgcggcgccggaggaatatcgggcttatggggctttaaaagataatcaggaactttactttatgaatacgcagggatttgagaagcatgtcaatctctatctgtataagaatgcgtatgctctgctttcgaccgcggcaggattcaaaccgtttcagaagggatatcaggaacacattgtgcaggcggtgattgatgaactggcgcaggtgtttgtcaaccatccgggagaatcttttccgtacggaagcgggcgtcctaatttctgggccggaaatgggattttacctctggcggtgcagtaccgcaatacggcaattctccggtaccggattggtgaagaggagcgaatcgattacacccatgcgtatatcccgatatccgcatttacccgctatcttggggaagacggtgtgattgctctggaaaaggacggcgcttacatcgcggtgaaggcgatgaaggggctgagcatgcagaaggaagggccaaaccgtttcagggaatttatcagccggggacgcgataatgtgtggatcatccgcgtgggacgaatggacgagtacggggatttggatgcgctgcttgccgcatttaagaaaatagaaataaggacggacggggaagagactatggtgaaggatgagaaaggaacggaatttttaaccggtccggacttccttctgaaagtgaatggagtaccggtctatgattacccgctgaatgtggaagggaaattaaatctggaggaatgggatcgtggttgagaaacagatgattgaaaagacgctgaatcttgtgtctgacaagatgatggtgctgaagaataatggcatgaaagaaaaataccctgtcagcttaattgatatcaactgctgggaatggcctcagggggtggggctcttcggcctctaccggtattatgaaatgagccggaagcaggaagtgctcacattcctgacagaatggtatgacaggcgcatggaagaggggatcgttgaaaaaaatgtgaatacaacttctcccatgctgacactcacctatctgtatgaaattacaaagaaagagtcctatctctcctttatcaaagaatgggcggattggataatggaggaaaaggggctgatccggaccggtgacggctgttttcagcatatgattaccggcagccccaacgattcggagatcctcattgacacactgtttatggcggtgctgtttttggcccgggccggcaaactcttaaatcgacaggattatatcgaggaagcaacgtatcaggtgttatgccatatcaaataccttctgaataagaatgaagggctgttttaccatggctttaattttgaacggaatgacaattacggtggaattctctggggacgcgggaattgctggtatacgattgtggccatggagctgattcaggagattcccatggaagacggtctgaagcgccatttcctcacagtatacgaaaatcaggtaaaggcgctgaaacggtatgcagacccggaaacaggactgtggcatacggttatcgatgatccggacacctatttagaactctctgcaagcgcggcatttttaaggggaattatgcagggggtgaggcttggaatcctgaacggggaggagtatgaggaactcatcgaaaaggccatgaaagggctgcttgacaacatcagtgaagacggaacggtggagaatgtgtcttacggaactccgattggacttgacaaggagttttacaataccattccctgctgtcccatgacatatgggcaggcgctgatgattctggctctttctgaggctatgacagattactggcattaattcctgcggcggcggtgtgcccgcctgctgcggagaagctgactacaggaggttgtgaagatgaaggaacgcgtattttttgaagaatttgaatctctgtattattttcatggcagtacacagaactgggcgatgcagggctttcattttcacaaccaatatgagattattctgttcttaaatgacggtgcgctgctggaaatcggtgatcgcgtctaccatgtaatgaaaggtgatctgttttttatcaataacagggaataccaccgtaccagcggggcggagggaaaagagtacaaccgctatgttctgatgtttgagccggaactgctggaaccgatgacaaaggcgttcggatatgattttaccatgttttttgagaacaggggagatgactttgtccacagactgtatctggagggagagaatctgaagcgggtggaacggctgctggccaaaatcgaaacgaatataggaagcggcagcagcgaggaggcatccgtaaagatccgcctttccattttagagctgattaccgcaattaacgagatgtataaattttttatgaaggagaagcacactgcagcagattctgaggagcagaaatggaaggaggaggacgggaaattccgggatccgattttgtatcgggagcgggtagagcagataaaaaaatatattaccgcccatgtggaggagaaactggatctggatgagattgcggggaaattttatatgaaccgatattatttgagccactattttaaaaaggaaacagggtttacggttctgcagtatgtgacgaatcagaaaatcattgccgcgaaagcgcttttgaagaaaggaacctcggtcaccgatgtggcgctcaagctgtcctacaacagtgacagccattttatatcggtatttaaaaagaatacaggaatcacaccgaaaaagtatgcgcagaataaaaagaacaataatgtatgatttttgatggtttatctgcgattaattgtgcaaaataactgataaaatgtaagtattaagagtaaaggagaggatcttatgaagaaatggttatcagttctgctggcaggggctatggtattggggacgcttaccggctgttccggcgggggcaagaaggccgaaaatgaagtgaagacgttggatgtcgtctggttcagtgatggaaaagagggggaatccttcatgaaactggccgacaagtacatggaggagaatccgtctgtcaagatcgagctgattgaagttccgtatgcggatctcgaaaacaagattaagaacatgatcaacggtaaggaagccccggcattggccaggcttacgaatatcgggccgttccagaatcagcttgtggatttgggcgagtatgtatcggataaggatgcgtttcagaacagctttggcgagggcttaaagtttgtatttgacggaaaaattctggcggctcccatggatgtgacagccaatggattgatctataacaagacggcgttcgaaaaggcaggcgtggctgtgccgcagtcagaggatgagatctggacctgggacgagtggaaggaagctatgaagaccgttatggaaaaaagcgactgtaagtatggactggtctatgacaaatctccacagcgttttacaacgcttctgtatgaggcgggaggcagtctgttaaacagtgatttgacagcttccaatttcaatacagatgagacaaaacgtgcggtaagcttcttcaaggagctgcatgacgagggaattattccgacatcggtttggctgggatcggaaaacccgaataacatgttccgtaccggccaggttgccatgcactttgcgggaagctggatgattgcaaactacaaggaagagattacggacttcgactggggagttacctacctgccgaaggaagccatgcgctcctccgtgccgggtggcaaatatctggcggctttccagaacaccggcgtggaaaaggaagcggcggatttcatcgaatggatctcaaaggctgagaacaatgcccagtactgtgtggagaacagttatttgtctcaggtgaaagggaacgagagcctggattatgagtatggaaaagacttctttaccatcttttcacaggaattggcagctaccgggccgcagccgggagctgagtggggctatcaggcatttaccggtgcgattcagaacgatttgagagataaactgattgaagtgctggcaggccagctgacggtgggtcagtatgcagaagatatggataagctgattaccgatgccctggaggaactgaaatagtctgtatctgttaatagaggagctgccgtaccggatgagggattcagatgggacggcggcttttttgaggagagataaaacggaaaaggtgatgtggcgttctggacttgtaatttatagattgcaaaaaatatgtttttgtactaaaattacaagtggaaagcactcacgacaggagtggaaaccttccggccttataaccggttcaccggaatacataggaaggaggtgcgcccatgacagcatacgagattattacgatattcatagggatattaaccttattaatgtcttttggctgctggattgtagcgttaatcgcctttctcgataagagaaataagcgtaaataaaaagcccaccctgtcagcacacagggtgagcggtgtccattaaggacatgtaactaatcatcttgggagcctccacttttggagtgggtgctttctttatatatttctattataaacaataccttcttaaaattcaagtaatttctaaaaaaatcccaatacagtaacaactgtgaatggtaactggtacggtttcttgtttggcttcctgacacttgatgtattctgatgacttattaatcttattttaatctcttctggtgcaaaggccgggcagtacgtttcgggttacggctttatgcaaaggctgctgtctttagacagattgcttttgtgataaagaaagagattaaataaaatataacttgttaaaaatataaaaacaaagtgcagttaccatttacaataaaaaactgcaatataatagtgaatagtattgtattatgcgattattacaaaaaaactttgtctgttttgttgaaaacattgaaaagaaagatattaaacttaatttaataaatgctcttgacaatgctgataaagtggcgtatattaagaaacaggaagagtattgaaacttctgacaagtgaaaattaaacttaatttaatggaggagaaaggcatgaggaaaaaactgatcggattatcaatcgccacagcacttggaattatgagtctgactgcatgcaagagccagccggctgagaacgcggacacaaagggtgctgcagatacaacggttcaggcggaggggacaaaagaggaaggcacggcaaaagaggcctcgggggatcgcgttaaactggaaatatgggactggtggggagatggtcagtacaaatacgtcatcgagcagctctgccagaattttaacgaatctcaggatcaatatgaagtagtgcatgtcaactatccatggggggatgtatggacaaaagcgctggcagctaccgcagcgggaaatcctcctgatgtgattattcaggatatccgtaccgtcactcacagggcggaagcgaagcaggcgacagatttaacagatctgattgcgaaagagggcgatggatttacggatcagttttatcctcagttgatggatgccatgatgtatgaggggcatgcatatggactgccctacgtaacggatacaagaattctttactatgataaggacgctttcgcggaggcgggactggatccggaggcaccgccggaaacatgggcgcagcttgtggagtatgccagaaagctggatgtgaaaaaggataacggctcctatgaacgccttggatttttcccggggaccctggagtggaacgcatgggccttcactgctgacgggaaagattatacagatgcagatggtaatgtgtacgtaaacacgcctgaaaaggtaaagatgtttgagaatatttacaatgacttttaccagtattatggtaagaaagagctggacagcttctctgctgaatttggcaatggcatgacgaatccttttgtggccggtaaggtagctatgtgggtgaatacaccgaccgagtttacaaaggtacgtgattacgcaccggataagaattacggcgtggcactgcttccgtccctggaagatggcggtgagcattactcctggggcggcggtttctctgttgagatcccttacggagccaaggacacagagggttcctgggaatttgttaaattcatcaccagtaaggaatcccagatatactgggcatcccaggtttacgataccgtggcaaatattgaagcgtcccaggatccgtctctgatggaaattcctgtatttaagatggcactggaggcaatgcctactacagttgtcactcaggacagactgactgcgccgggcgcatctgatattgtgcttccgtatctggatgaaatcattcttggcagcaagacgccgcaggaggcacttgacgaggctcaggcccaggttgaacagctggtttcagacaataaatagcggatacgtcgggaaatgagaactggtgacagataagtaagatactgaagatgggtacttcctgtcatatggaaggctgagacacagggggtgtcaaatgacaaagatgaaacacaccatgacgaagcgtgaaagcagagaggcgcgtgcgggctggctgtttatcagcccgtggctgatcggcttcctctgtctgacaggaggaccattgcttttttcgctgtatgcatcatttacaaattataacatgacttccaggatggattttatcggactttccaattacatcaggatgttcactaaggatcctgtattctggaagtcattaggcaacacactttactatgtggcgctggcagtgccgagctcctgtatctgtgcgatttttcttgcgacactgctgaatcagaaggtgaaggggacgccgctgttccggatgctgttttacctgccgaccgtactttccggtgtggcggtatatcagctctggatgcagcttctggcacctcagagcggattgatcaactctgtgctgcggctggtgggaatcgaaggcccctcctggctctcagatccggcctggacgaagccgtctctggttatgatgcgggtatgggcgctgggaaccagtatgctgctatacttatcttccatgaattcggtctctaaagatttgtatgaggcggctgatatcgatggagcctcatttttacagaaattccggaagatcacgcttccgcagatttcccctattatcttttttgatatcattaccaatatgacgggggcatttcaggtatttcaggaggcgctggtcatgagtaagaacggaaagggagatccggcaggatcccttctgttctacaacctgcatatttatcaggaggcatttacccattacgacatgggatatgcgtctgcgatggcatggtttttgctcctgatcgttatgacaataaccgtgatcaatctggtcgcatcaaaatactgggtacatacggaagaaggtgagacgtaatggctgctgatacgaaaacagtaaaaagaggcggactgtccagcaggcgcagaaaaaaggcaattgtaaacgtgatctgttttattcttctggctgctgcatccctgactgtgattatgccgctgtggtttatgatatccaccgctttaaaaagcatggacgagatatttacgtatccgattacgtggtatccccacgaaccgatctggagtaattttaaggacgcctgggcaagcgcggaattcagccggtggtttttaaactccgtatttgtagcggcatttgccattctcggaggtgtccttgccaattccctggtggcctacggatttgcaaagatacgctttccgggcagaaatattatgttctccattatattggcgaccatgatgatcccggaatttgtgacgatgatcccacagtacgtcctgtatgcaaaaattggctgggttggtacatatctgccgctgattgtgccgcagtttatgggatcggcgtactttatctttatgctgcggcagttttatgcggggattcccaactcggtgatcgaatcggcacagatcgacggagcctcccatttccggatctggaggagtattatgcttcccatggccaagcctgcgattatgacagtggtggtactttccttcaactggagctggaacgactttttaaagccactgttgtatctgatggatacgaagacctttaccttgcagctggggcttaagatattcgtgagccagtccaatacccagtggaactacttaatggcggcctcctgtattgttttgcttccgattatcgttgttttcatgtgcctgcagaagtactttacggatggcatgaatatcggcggagcggtaaaaggatagttgactgacgctgctcactgtctttggaacctttggcgaattgaaatatcgtttggcctgaagtataatggtaatatgaaattcagacaaatgaaaagggaaaaggaagaaatatggcagaccagaataatcaggtacagctcaagaattttaacagaagaacggtgctggggtatatcagaagaaacggcacggcgacaaaggcgggccttgccagcgtcaccggcctgacatttatggcgatcaagaagatcctggcagaactccaggagctgaatctgatccgtgacggacagatggaatcgggtggcatgggcagaaaagcagtttcctatgtaattaatgagaattaccgctataccataggcatccatatcaataaatttattaccggcattgccctcctgaatctgcggggacagattctggccattgagcggtattccatggataaggaatttgagaatcagaatgattttgtgaccatgctggcagaggccgtggagctggtaatagaaaagtccggtgtgaagcgggaagatattctgggaatcggggtaggcgccccggggcctctggactgtgaaagcggcgtgatcctgactccgcccaatatgccgatgctggactatcttccgctgaaggaaactctggaggggagaaccggttttcctgtttttttaaataaggatacgaatgtaattgcatttgccgagtactggtacagaaataacagggattgctccaacctggcgtatgtggaagtggacatgggaatcggcagcggcttgattatcgatggaaagctgaatgtaggtgccaactgtatcgccggtgaattcggacatatcacgattgacatcaatggtccactctgcaattgtggaaatcgggggtgcttagaggccatgagctctggtattgcagtactccggatgttgggagagcagctcgagaatcagaaggatcacccgctttaccataagaggaacgcactgacgatagaggatgtatttgagatgacggacaaaaaggatctgctcaccatctctatcttaaaccgttctgccttctacgtgggtgtggcggtcagcaatctgattaatacctttgatccggagatgattatactgggcggaattttgatacagaaatatcccatgtattttaatattgtccaggacgtggcgaatcagagaaaagtgaagggagcaaaggaaaactacatggcggtatccgtattaggggaaaatgcgggtgtcattggcgcgggtgagattgtgacggatcacttcttcaatcagtttgtgaacgaagtgtttcattaaaaaagaaaaaaggacgaaaaaggggttctatgtttagcagcagaaaaataactcagtgtgatcagatagaattgatttgggatgacagagtggtttttctgctgtctctttctccggaggaagggacagcgggagaactgcagggatcggtatcggaagacacggtactcattacggtacgggcggaaaaggagacgcgggagccctgctttggaccgcaggcatattttgattcccgggagggcatcgtttaccacctggatattccggagacggagcgtttccttgccgtctatcagcataaggactggtgggtcagacccgcttttttttcggacataaaagagcttccggacaggacacagctcctgctgtttcagagtggagcgacgtattttgctgttctttccgtatgtggagaagataatcggacggatatgtgcagtatggaccggtaccaattgaaccggtgcagtctggaaacagatagagtaaatcgttcaggtgctgagaatcgtctggcggtccgcatggcgtcgaatgcgggaaaccgaaaccgtatggaagatttgagtctggcgatcgccggagggagtgatccgtatctctgttgtgagagggcggttcaagcagctcttggcaggctgggacggagctccatgcttcggaaaaacagaaaattccctgaaaaactggagttctttggctggtgcacctgggatgccttttatcacagggtttcccatgagggcgtgatggaaaagatgaaggagtttcaggcgaaacagctgccggtgaaatgggtgctgctggacgatgggtggcttgatgcagattatgacaaaaaggtgctgatcggactggatgcagacagagagcgtttcccgaaggggctgaaaggctgtgtaaaggaactgaaggaaacatggaacgtggacagtgtgggagtctggcatgccgtcatgggctactggaacggcctggccggtgattcgccggcggctgaaacgctgaaggtgggaaccagagttttaccggatggccggatacttccggatccggaggccggaaaggcatttaccttttttgaaacatggcataaatatttaaaaaactgctgcggcatcgattttgtgaaggttgacggtcagagcgcggtttcgctggcttacggagggatggagacttatggacacgcctcctgcggaattcagaaggggctgaatgcgtcggcagctctgtattttgataattgtattattaactgcatgggaatggccggtgaggatatgtggaaccgtcccagcagtgccgttgcaagaagcagcgatgactttgttcctcaagtgcctcacgggtttaaagagcatgcggtacaaaacagctataattcacttcttcagggacagttttactggggtgactgggatatgttcttcagcagtcatgaggaaaactggcagaattccattctccgcgcggtgagcggagggccggtctatgtgagcgatcgtgtgggggagacaaatcccggctttatccggccgcttatcacagagacgggcctggttatccgatgcagggaggtggggatgcctacgacggactgcctgtttgataatccggcggacacgctgcgcccgcttaagatatttaaccggtacggagaaaactatgtgattggtgcgttccatatctgtgaaaaagacgacatctgcctgggaaaacttgaaatgtctgatatcccggaactttcgggacgtaactggctggtgtacgcttatcaagcgggaactgtatgcagactgggagagtccggaatcaatttttcactcccggaaggcggggcagaactgtttttgctcattccggataaaggccggggcaggctgatcggcattctggaaaagtacatttcctgtggctgcctgcggattctgcatgaggaggagaaccgcgtggcggcgctcgttctggaagccggtacgcttggaattgcggcggatcggccgccggtccgggtgtggatagacggcagggatcacgaagcagtatgtcatggcggcatgctctggagcgtttactgtgaaaaaccggactgcctggtggagattgagtggcagtccggcggattatgactgaacaatacagggaaaggtgaggttgtgcgatgatatctttgggaatcgatattgggactacttcgatctgcgcggtcctctatgacctgacagaagataaaataatcaagagtttaagtgtgcccaattcctttatcaatacggggagctatctccaggatccggacagaatcgtatcgctggcgaaggaattgctcaaagaattgctgatggaatttaaggcgtgggccggagaacatgaagcgaggaacatcaggaagccggccggagtggggatttccagtcagatgcatggtattttgtatacagacaggacagggagggcggtatccccgctttacacctggaaaaatgaggacgggaaccagagataccgggatggcctcacctatgcacgttatcttgtgaaggagacggaactcccgttttatacgggttacgggagtgtcacccatttttaccttcaggagaatcagcagattccggatgaggcagtggcatttgtcgggattggcgattatgtggccatgcgtttgaccggaagccgtaaggcagttgttcataagacgatggctgccagctttggaggatatcacatggcggagggacggtttgaactcgataaacttgcggctgcgggtgtggatatttcctgctatccggctgtcgcccgggaggaaggccaggctgtcggaaccgtggtaatggagcagacggcggttctgccggccgggggaaccgctgaaccggaagcgataccggttttctgcgcggtgggagataatcaggccagttttctgggggctgtcaaagacaaggaacacagcgtcagcatcaatgtgggtaccggttcccaggtgtcggtttacagcggcgaatgggatccggcggcaggaactgatatccgcccctggattgatcatggttatttatatgtaggcgcctccttaaacggaggaaaggtgtatgagcgcctggctgcgtttttcgaggaggtatgtgaggaatttgcagggcagaaggtgaacgcctatgaaaccatggagcgtctggcgatggaggaacaggagactgagctgcgtgcggtccccagcctttacggaagcagggaagagacggaccgggaaccggaagcgggaatctacggattaaactccgggaattttcatcccaaagacttaatccgcagctttaccacgggcatggcccgtgagctgttcgccctgtacagcgcattcccggaaaaggcatgtgctgggaagacacagattgtggcgtccggcaatgggatccgcaaaaacaggcttctgagggaagatgtggaaaaagtatttggtctgcccgttgtatttacggacagggaggaagaagcggcgtccggcgcggcgctgtacgtccgccaggcggtcattgaagggggagcagaatgcagataattgcaggaatagatattggaggaacgaagagcgccgtctcctttgcccgttatgcggatgggggaattgagatcctggataaggtaaaaaggcctacaaggacggcggattatcactcggcttttcatgagtatatcgagattatccagactcagttaaaagccagtccggactggcggctctgctcgatcggtatttcgtgcggcggaccgctggatgcggaaaaaggaatcatcatggcgcctcccaatttgccggaatgggataatgcggatattttcacacctttgcgcaatgcattccgtgtgccggttatgctgcagaacgatgcggatgcgtgtgctctggcggaatggaggcttggcgcggggaaagggacgaaaaatatggtgttcttaaccttcggaaccgggatgggtgccggcatgatcttaaacggccagctgtatcagggatccacctgtatggcgggagaggtaggacatatccgcctggaaaaggatgggccttatggctatggaaaaaacggctcctttgagggcttctgcagcggaggagggatcgccaatttaggaaggatgaaggcacaggaagccttggaaaaaggtgttgttccctccttctgcaagtcgatggatatgctgccgcaggtagactgtaaggaaattggccgggcactggaggaaggcgatgccacggccagggagatctttgatatcgtggcggagtatctgggaagaggtctttccatcctgatcgatattttaaatccggatatgatcgtgcttggcagtatatacgccaggcagagggaggctctggagccgggaatgcaggcggtcattgcgagagaagccctggctgcgtcgggaaaagcctgtaagatagtaccggccactctgggagagatgatcggggactatgcggctgtttctgtagggatgaaagcctacgatgatttttacagataagggaagaatacgatgaaaaataagattatgctgattacatatgccgacagctttggaaagaatttaaaagagatgaagggggtcattgaccggtatttcagaagggagattcattcgatccatattctgccctttttcccgtcatccggggaccggggctttgcgccgatcaattaccgggaggtggatggagcctttggaacctgggaggacataagggaaattgcagaggattacgaattgatgtttgactttatgatcaaccatctgtccagaagaagcccggaattcctggattttattgaaaagcatgatgagtcggaatacgcggatatgtttctgcgcttccgtaagttctggccgggcggggaaccgacggaagaacaggtggaactgctgaacaagaggaaaccgtgcgcaccgtgtgaagaaattgcatttcgggatggaaccacagaaaagatctggtgtacctttgatgatgagcagatggatctggatctgcggagtgaatcggcatggaactacgtggaacgtacactacgttttctgatggatcaggggctttcccagctgcgcttagacgcctttgcctttgccacgaaaaaagtgggcaccacctgctttttcctggaaccggagatctgggagatgatggaccggattcagcgcgtgctggatgagaaagggattcccatgctgccggagattcatgaccattataccgtacagcttaaaattgctgaacacggctatgcagtttacgattttgttctgccggttatggtgcttcatacgctctactcgggcagcagtgccagaatcagacactggcttgccatatgccccaggaatcaacagacgacgctggatacccatgacggactgggaaccgtggatgtcgtggatttactctccccggaggagcttcaggctgtggttgaccagaccgaacagtatggagctaattttaaatgggattacagcggcggcaacagcagcggagagaaggtggtgtatcagataaactgttcctactattcggctgtgggggaacgggatgacagctatcttctgtcccgtgccattcagtttttcaccccggggattccacaggtctactacatggggctcctggccggcgaaaatgattatgaactgatggaacgcaccaactatgaccggaatatcagcagacacaactatactgtagaagagattgaacggctggcggagaagcctgtcgtaaagcagctgtgcgtgatgatgcagtttcgaaatgaatatcccgtgtttgagggggagatgacagttcacaacacgccggatgagcgcctttggatttcctggatggcgggaccgtgccgggcggatttgaaggcggaattaaagagccattcctttgccattacgtatctcgaccgggagggctgtgagaaggcgctggatctggatcgtgattttagcttttaatggcaatggccgtctgaccggtcgtcaggagaggaaaacagatgggatttgagctgggacaggaaattctgaagccggagtctcccgaccggtggagagagacaggatatctgataaccggtaatacgctggaggcggtgaaacggtcagtctgtctggcgcgccggggcgaaagggtgctgctggctgtggaggagacctttctcgccgcagatataggcagttacttagattatgaaagcagtccggaactgcagggattttttccggattctctctgggagaacggctgtctgcatccggatggatataaaaagtatctggagcggttatgccgcgagcagggagcagaattctgctacgggttgtattttatggacgcggtttctgaggagaaggagaaaattgaagtaagatttgcctccaaggggggactgtatggagtccggtgccgttatcatgagaagtttagccagacgaataaagggggaaggacggtctgtgcggcctggataaccgatgaaaataccggtaaaaaccggattctgaaggcgccgtttctctggaagccgagagcgacggaagcggagaatctgctggctggaaggagagagctgcttctggcctttgagagatcaaaggcggaaaatccggctctcaatctgggacgttttgctctccggccgggaaaaggggaaaaatcctgctcaaacctgaaagaggcaccgtttgacgtgatcgtcgtgggaggcggcacagccggggccatggcggcgctgtatgccgcccggggcggcgccgggacggttctgattgaaccgcagtatgatctggggggaaccgccacgttagggggtgtcagtacttactggtttggaaaacgttacagggatgtggaagagattgatctggagacggaccggctggaacagcagtatggaatcagcagaaaaccggggctgtggagtgagtatgatgatttccatgcggggataagaggatacgtgctgttaaagctgtgtcttgaggctggtgtatccgtggccttcggacagattgcatacgatgtggtaaaggagggaacccgcgtctgcggcgtaaaaacagcgggacacgctggaaagaaaaccctgagaggctctctgatcatcgatgcaacgggcgacggagatctggcgtatttttctggtgcggagacggtctatggttctggccgggactgctttacgtactgggcttctctggcccagtatacgggaactgccggataccggaataatttttcctccatggtgatggcatctgatccggaggacatgacccggtttgccgttcttggcagagagcggggggaggggacgtttgatcatggggcttatgtgagtatgcgtgagagccgccatatcacagggaaaaaaatgatcgatctgcgggacatatgcacgttccggacgtatgatgacgggatctgcaccttcttttccaactatgatccaaaaggaaagctggatgcagacatggtatactgcggatatcttccgcctcaggtaaacatgcagattcccttaagcgcattgatcccgaaacaccgggagggatacagcctggaaggactgtatgtggtggggaaggcagtctctgctacccataacgcctttcccgggctgcgtatgcagccggatctgatgcaccagggggcagtcctgggactgcttgcagccagggcagcgaaatccagctgtctgatagaagcgctttccattccgcagaggcgggcatggatcagggaggcgacgggggacagtctgactcttccagataaaatccggtatcaaagtgacagccggaatattccggattatgcattttatgcaggacaggtaacgggagagagccgtacacactggattgacgttccgtttacgtatgaggagacgaagattagtccgctgctggctcttgtgtgcggtgagagcgaacatgtactgccctgtatccgtaagcggatacagacgctggaagcggatgaatatgggcgggaccagggaacgctggcggtactgaaacgggcggcgctgtttcatggatgcaatgattatatggaagaaatgcagcagagtattgtgcggaggattaatgaggcaaagcccggtctgccggtgagaaaaggatctgtgatgtgtgcacagcttctcccggatcatggagtgatgccggagcttgtgtatgacttaaatctgctgtccggcggagacggattttccatggaaccattttatctggtgtttgaagtgctgaagaaggaagagcgggattacatggatatcagaaaggggacgtattcctatctggaatgctttgcctatgcggccaggaggagcagccgtacggagtttattccgcttcttaaggggctggcggaactgcctgagtttcagactgcgctgcaggaagagaatcaggtatccctgctggcggagcgtatgcagatgcttcagcttcttctgtaccagtcgttagccgggctgggggagagagaaggggtaaaaggtctggaacggctgagcaaggtccgctgtctggcgatccgcagatcggctgagatggtgaaaaaagcagtggaagaaggtgacttgggcggcgcagaaaaaatatggtgagtgagcaggagatgcatgatggagaaaaaacagctctatatgataggaaattcccatattgacccggtatggttctgggaatgggaggaaggaatgcaggaggtaaaggccacgtttcagtctgccctggaccggatgcgggaatttgaggattacaggtttacttccacgtccacagcattctttcagtggattgaaaaacttctgcctgatttattcgaggagatcagacagcgggttctggagggcagatgggagataacgggaggctggttcatcgaaccggactgtctccttccctgcggcgaagcctttgcccgccatggcctgtacggccagcgctatttaaaagaccgctttggggaaatatgccggatcggctccaatgtggacagctttggtcacagcggcagccttccgcagatattaaaaaagagcggcatggattcctatgtgtttatgcgcccaagactggataccccggtcttccggtgggaaagttcggacggaagcagcgtgaatgccatatgccttcctgcggagtacaccacctggttccgggaaccgaccctgaaaaatatcaatgatacactggaacgtacaaaagaatatgacaaaatggtctgctgctacggcgtaggtaatcatggaggcggtccgacgattgaaaatatagaaacaatccgtgaacagatagaggactttgacggtgcagagctgcattttgcttcctttggggagttcctggaagatatcagggactggagactccctgtaaaaatgggaccgtttgaaaaaatcaatcaggggtgctattccaacgattcgaggtttaaacagttgaaccgactggcagaaggacggcttatggccgcagacacattcctgtccatggcggccgcgctgacgggagtgtggccggaggaaaccgggaaaatagaagacctgtggaacggtctgcatttcaatgagtttcacgataccatgggaggtactactattaagccggcgagggaggaagcggtgatgcagctctcggcggtatgtgccaaagccgcatcagtcagagaaacggcgaagcagagaatcgtgaacagcctggataccagcggagagggataccccctgttcctgtttaacccccatggcaaagacttttctgattatgtggaggtggaactggaatggttttgccagagtccgcttaagctgtccgatcccttcggaaatgaggtaccgtatcagagaatacatactgcggcaaaagtccgccacacggtgttgggaggaagacgccgcatcgtcttccatgcatcggttccttcctgcggctatgcggtatacaggctcaggaaagagacgccgtcccttggcttcaatcagaacatggaactcgacaatccggatccctatacgctggaaaaccggtttttacgggcagagtttgatccggagacgggaatgctgtgtgccctgaaggacaggactgccggatacgacgccttaaaaggcccggcttctgtccggctgtatgtggacgagcgggatgcgtggggcggtctgcagggaaagcgatttgaagacagaaacgtaacctttcggctggattccatcgataaggtagaaagcggagagattcgggagactatccgggtccggctgtcttacgagggaacgagactggaacagctctattccctgggggctgatgaacgggaactgagggtggagaaccggctgtgttttgcgcatccccgcgcgcttttaaaaaccgcctatccgacgggggagggctgtcttatcacccgggcggagactgcatatggaattgtggagagagatcataaaggggatgatggcgaatataatatgcagcgctttctcgatgcggcagacggagcgggacgaggccttgccgtctcaaatgatggaaaatacgcctttaacctgactgagggcagaacgcagatcactgtagcccggagtgcgatttatgctcagggaagcagtccggactgggagaatgagattgagagttatgaatacatggatattggaacgcagacatttcacctgatattaaagcctcacgggaaacggcttcccgcatctgagctgtaccgcattgctgagaaagcaaatggttcttatgagtatcttatggacagcgcccacaagccgctgacgaacgacggccgtggctccatggtcttatcgattgcgggaacagaccgggataacgtggcagtccaggtgatgaagaaggcggaggacgacgatggcttcattctgcgtctgctggaactggagggaaaagatacggactatcacctgtaccttatgggaaatacgtatcccctgacgattgggcatcatgagatacagaccatcaaaacagacagggaaggcaggaacataaaaatagtgaatctgctggaatgggaagaggaatgggaagaggaaagggatcggaatggagaaagataaaaaattatacatgataggaaatgctcatattgatgttgtctggctctggcagtggcaggaggggctgcaggaggtaaaggcaacttttaaatctgtgctggaccggatgaaagaatacgacgactttatctttaccggcagttctgccgcctattatgaatgggtggaggaaaatgatccatccatgtttgaggagatcagaagccgggtgaaagagggaagatgggtgatcgtgggcggctggtggaccgagccggactgcaacgccccatgcggagaatcctttgtgagacaggggctttacggccagaggtattttgaggagaaattcggggtaaaggcggtctgcggatacaatgtggacagcttcggccacaacgggaatcttccccagatattgaagaaatgcggcatggacagctatgtattcatgcgtcccggccgtcacgaaatggggattgcaggggaaaactttgtctggaagtctgccgatggttctgcggtgaacgcatttcggcttccctttgaatactgtacctggcccgatcagatcgaagagcatgtcagacggtgcgccggtgagatcaaaaattccgatggcggtatcatgtgtttttacggtgtcggcaaccatggaggcggccctacgaagaagaatatcgacagtatccatcggatgaacgccagaccggatatgccggagcttcagctgtcctcccccaatgaatattttgaggatgtaaaaaagagggggagagacctgcctgtggtctgcggggggctgttccaccactccagcggctgttacagcgtggaatcgagagttaaggcgttaaaccgggcggctgagatgcgtctgcttatggcggagcgggtatctgtgatggcgggactccttacaggcataaggtatccggcagaggagtatcagaaagcatggaagagcgtgctgtttaatcagttccacgatattctggcgggtaccagcttacgggagtcgtacgaggatgcggcggaggattacggctatgcgcttcacgcagcgggaagaggcttaaacagtgccgttcagtcgctgtcctggcagattaatatcccgatggaagagggaatgaagcctctggtcgttgtgaatcctaatgcgttcaatacgaaagcggaagtacaggcagagtcctggacattgaaagagggcacggtgctcctagatgagaatggaaaccagattccctgtcagctggtacagtcaagcgcagccttacaggggaggtgccgcatctgctttgtggcagatcttccttctctgggctggagaacgtaccggtttgcggtcagggagaaggcagagacgtttccggaggtggctgtatcggagtgcagtgcggagaatcggtggtttaagcttacccttgatccggagaccggttatattgcttctctgttaaaaaagaacgacggcacggaatatttttccggtccggcggcagttccggtagttatcagggacgagagcgatacgtggtctcatgcagtgcggatttttgatgaggtaatcggcaggtttcaggctgtttccgtccgtacggttgagaacggaccggtcaagtgtgtgttccgtgtaaccagtgtctggggaaattccagaatcattcaggatttttcggttttccaggatctggattatattgcggtcaagactacggtagactggcacgagaaacaggccatgttaaaacttcagtttcctatgaatatgaattatttacgaaccagctgggaaataccgtatggtatggaacagcgggagccggacggagaagagtatcccatgcagatgtggctggatctggaggggacgaaccctggaatggagacttccatgaatgggctgtccatcttaaatgacggaaaatttgcaggcagcgcggcgggaaagacggcgtcgcttaccgtgcttcggagtccggtttatacccaccatgagccgtaccagctgcaggaaaatctggaatatgtctatatcgaccagggaacacagacgtttacgtatggtctctatccccatgacggaagctgggaaaatgcggagaccgtgagacgggcgaaagtgatgaactgccggccgattgccctgtttgaaacgtaccatgagggccgtctggaacagacggggtccctgatggaggtcaatcaggaaaatatcgttgtggaagtgctgaaaaaagcggaagacggcagcggggatttgatcctccgggcttatgagacagccggcagggcggtgaaggcagaactgacaatcggtgtactggaacagaccatagaggcggatttccagccgtttgaaattaagacattacggctgccgggccaaaaaggcggagatgctgtctggacagatatgctggaagaatgaggcagctaacagagaaagggagagagtatggatcatttaaaacggcttatgcagcgttttcccgtgttaattgatatggagggagaactgatgcgtgcttatgaccttctggaagatgcttactcacagggcggaaaactgctgctctgcggtaatggaggcagcgcggcggattgcgatcatattgttggggagctgatgaaaggtttttataaaaaacgtccgcttggcagtgccgaaagagagggactgggagatctgggagaccgtctgcaggaagcgcttcctgcaatctcgttgacggggcacagcgcgttgtccactgcatttttaaatgatgtggccccggaactggtatttgcccagcaggtatacggctatggcaggcgcggtgatattttggcggcaatcagcacatccggtaattccgtaaatgtggtaaacgccgccagagtggcaaaggccagaggactttctgtcatatccatgaccggaaaaacgggaggagtcttgaaggaaatcagcgacgtatgcctggcagttccggcggaggtgacagccgacgtgcaggaactgcatctgcccgtctatcacacgctgtgtgcgatgctggaggaacatttttttcctgacacagacgcaaaataaaaggaatctctttggttttccacaggaacagtaaataatccggttcatgatttgattgccgatattgctgaataacggtataatatccttaaaacgtggagcttgggaggtaacaggatcatgaacaacagaccagtaacgacattatttatgctgatgtccgtagatgggaaaatcactacaggtgtatccgatgaactggacgtagacaaaaattttccatgtatcaagggtgtgaaagaaggactgcaccagtattacgagttagagcaaatgacagatttatggtcatttaatacgggaagagttcagaaaaaattaggggtcaacgaaaaagagtttccatcaaaatcaccggtatcttttgtgcttttggataatcatcacttaacggaacacggagttcgctacttctgtgaatggtcaaaggagtttgtattgattacgcaaaatcctgtccatccggcattttccgtcacggcagacaatttacacattatcaaacaggattctttggatttagcggacgcattaaaagttttagaagaagagtatggctgtaaacggttaacaatccagtcaggcggcaccttgaatggactttttctaagaaataagctgattgattatatagacatcgtcgtggctcctgtattgataggaggaaaagatacctccactcttatcgacgggagttctatcacatcgatggaagaattaaatttattgggagtgctgcagctcgaaacgtgtgaggttttggaagattcctatattcgtctgagatatcaagtaacaaaatagaaaattaacaaatgtaagaagattctatggaacattaagtgtgaaagcacggaattccatggaatctttttattttttgcagagagtgtaaaaacagatacgatacagccgcccccttaacggttcacacttttatcacaaaaacatcaaaatatgaacacagaatcatcacaattattttttacgctatgtactaacaccggatatgcggggcatgcggtgcgggcagcttttacggccccactcctgccggcataagtcaaaaacccggcagccgccaaatggacgcgccggcgtgtccgtttgtctcattgccgcggaaataaaaaatcaggaggagaacgagttgatagaagtgaagaatcttgtaaaagattacggcggccatctggcagtggaccatctgaattttaccatagaggatggtcagatttacggatttttagggcctaacggcgccggaaaatcgactaccatgaacatcatgaccggttatatcggtgccacggaaggagatgtcctgattaacggacacaacatactggaagaacctgaggaagcgaagaaatgtatcggctatctgccggagcttcctcctctttatgccgatatgacggtgatggagcagctggattttgcagcggaattaaagcagataccgaagaaggagcggaaagatgccatcggtgaggtggtggatctggcgaagctggaagacgtgcagggcaggctgatccgaaatctgtccaaaggctacaggcagcgtgtagggctggctcaggccgtgctcggcatgcctcctgtcattattttagatgaaccaacggtgggactcgatcccaaacagatcattgagatccgtgatacgatccgggaactgggcgaaaagcatacggtaatcttaagctcccacattctgtccgaagtcagcgcggtctgcgaccacatcctgattattgaccatggaaagctgattgccagcgatacaccggagaatctggagcgccagatggccggtgcgtccggcatggaactgctcgtgaagggacaggaagaaacgatcagagagatccttgagcccattcgcggggtggaagaaatcgcggtaaacgaaaatggcggagaagatgtgagaaaggtgaccttccggctggcggcagagtcggagggctcagactacgcggaagcagccgcttcctccccggatggtgcctctcagacagacatcagagagaccatattctttgcgtttgcagaccggaaaatccccattctctccatgcagaccacaaaagcatctttagagcaggtattcctggagctgactgccgaagatactttggatacggcggacggcgaagatgcttcagacgaagactccgtgatggaaacagaaaaggaggaagtataaatggcggcgatttataaaagggaattgaaatcgtatttccaatgtatgaccggatatgtattcattgcttttctggttctgtttgtcggaatttactttatggcttacaatctgatgagcggatatccgtatttttcctatacgctgtccggtatggtgaccatagtgatgatcggaattccggttctgaccatgagaagctttgcggatgacagaaagacaaagactgaccagcttcttctcactgcgccggtttcggtaccgaacatggtgctggccaaatatctgtccatggtaaccgtatttgcggtcccggtcctcatctcctgtctttgcccgctcatcataaagatgaacggcactgcgtatttaaaggcagattatgcgtcaattctggcgttcttccttctgggctgtgtctatattgccattggaatgtttatatcttccacgacagagagccagatcatcgcggcggtggggacctttggagccatattactgctgcttctgtggcccagcctcgtgaatttccttccgacgtcggcctccgggtcgctggtcggcttcctgcttctctggacactgtgcgtggtgatcctccatcgtgtaacgagccataaccttctggcaattgtgctggaggcggcaggagtcgttgccctggtgggagcgtatgttgccaaaaagagcatgtttgaccgtgcgtttgttactcttgtagaaaagattgcggttacggatgtgtttcagaattttgccagcaactatatttttgacgcgggtggtctcatttactatgtgagcattatatttctgctggtatttctgaccgtgcagtccgtggaaaaacgcagatggagctagtacagcactgtataaggaggctaaaatgacaagaaaactgaaaaaaggcggttatgctgcgatcctttccgtgatcgtaatcgccgctgtcgtgctgttaaatatgatcgtaggccgtcttcccgaaaaggtgcgccgatgggatttaagcggtacacagatttatacagtgggagatacgacgaaggagcttttggcatctctcgataagaacgttacgatttatgtggtggcggatccaaccatggtggatgacagaattacaagctttgtaaaccggtatgcggacctttccgatcatattaaggcggagaccgtagattccgttcttcacccggaccgggtaaaacagctgaatgcggaaaacaatacgattctggtggtgtgcgaggataacggaaagaccgaaacgatccagatgagcgatattattaagtatgaccagatgtcttactattactacggccagacgaaggagacggagttcgacggagagggccagctgaccagtgcggtctcctacgtgacgaacgatgtgcagaaaaatatctatgtgacggagggccacggggaggcagccttaggaacacttgcgtccgatcttctggaaaagtcgggccttacggtaaataccgttaatttactgaccggaggcgggatcccggaggattgtgagcttctcctgatcaatgcgccggtcagcgatctggcagacgacgaaaaaaccatggtgacggactacttagacggcggaggaaaggtgcttttgatcgccggatattccgataaggaccgccccaacttaaatgccgtcttaaacgcttacggtctgaatatggaacatggactggcggccgatacgaagagctgctatcagaacaatccctactacattttcccgacgcttgtatcgggcagtgagataacgaacggaattgacagaaagagcaccgctctgatccttcagtcgtctgcattaaaccagctggacacacttcccgacggcgttacggtagagccgtttatggagacgacggatggcggcatgcttgtcacagagagcagtcagacaccggggacgtatcttctcggcgcgacggcagagaaaacactggattccgggactgcaagacttaccgtattcggtacgccttccctgattgacgacggattaaacagtaccttttcgaatctcaccaatttagacctgtttatgaatgcggtaacggccaatttcgaagatgttaccaatgtctccatcccatccaagagccttgaggttacctataacaccgtaacgcatggcggcatgtggggaatcgtttttattctcgttatcccggtggcaaccgtggcggcgggacttatggtatggctgaaacggagacgtttgtagcaggttatgacggatctgcacggtaaaatgaaaatggaggcgcggcaatgaagaagaattacggactgcttgcaggctgtctggtggtcgcggcactgggcgtcatctatgccggtgtcggggcgtatcaggatcatacaaaggaaaaggaacggcagcaggcggagacagaaaaaatatatatgaccgatttctctgatatagaggccatttcctatgataacgatggaaatgtactggcatttacaaaggatggcgattcctggacttatgacggtgatgaccagtttccggtcaatacgacccgcatggattctctggcaggaacggtaaagaagcttccggcagtaagaaggctggaggggggagacgaccttgccgcatacggcctggacacaccgctgcggcgggtaacggtatcggcggatgacgggaagaccgttaccattctcattggagataagacggacggcggtaattattatgccgtgatcgacggccagaatgtcccctgtctcatcagctcctccctgtttgacgagacggcctgcgggctggaggacatgatggctctggaagagtttccggctgtcgtggggaccgatattcagtcgatcacgattgagaaaaacggcgtcagcgaacattatgtgaagaagaaactggctgaggagacctcccctcaatctggttcggcggaaagtgaagacggaaccatcgcctggtaccgggggtcggacgatacggaagacaacaaactgccggacaattcggcgctgaatgtactggccgattcgctcagcggtctcgtcgtgaagagctgtgcaaactataaggtgacggatgaagaactggccggttacgggctggatcatccgcaggcggtgctgagctatacgtacgaaaaggacggagaagataagacattcagcctgtcggttggcaatcccggcgaggacggaaccacctactatacgaggacagaagattctaagtatgtgaacgaaatcgacaagacagctctcgatcaatgcatgaccgcagacacgggaaatgatcagtagaaaagcccctccatattgacaaatacctgcctttccacttacaataaaggaaccaacagggaagagagtggggctatgggcgtagagaaacgatatgaattattttgtgaactgttaaatacgctggatgaaggcgtcgatgcgattgaagaatacgattcgctgctccatgattatcgcggaaccgtcctttaccaggcagaatctcagattattaaggccgtcggggaccagccgggaattacggcttcagaactgtcccgggtgtttgataagaccaacagcgcctgctcccagctgatccgcaagcttaagaaaaaggaatggatcaggcaggagcggaacgaaaagaataaccgggaatataacctctatctgacagaggaagggaaagtgatttataaaaagcatgaagagtttgagaatgcctgctatgagaggacgtatcatatgctggatgggatctccgaggaggagatgagaacgtatattggaattcagaagcagttaaacagagcgtttaagctggacgtagaggaaagccggcagctgtcgggaaacagcggggccgaataagagacagggccgcagcgaaagcatagaactttcgctgcggccctgtctgtcctgttacttatggataagatgtgatgctttgtcataatctgatttcaaaacgtagattcggtattctgtgccggccgtgatattctcaccaaactgctgtatggtggctccccgcgatccaaaattacgcatgaaagtccctttggtatcgatgatgtatttgattccttcggccgccagaagattacggattcgtgcctgctcactgatggaataagtaattgccagttcttttctgttaaatatggtgatcatcttggtacatcctccatgttctggttgcggtttggcagttcccattacagatagtatgaattacctgtatcataccatggtttacgggcagattcaagcgttgaaagatttcagttgacaaacagcaggaactgtattaatctgagagtatgatagatagttaagcagattaaatattaattggcttatgtaaaaagtggaacatgggacaggaggctgcaagatgaagtatgattttgacacacgggtagagagaagaggcacatactgctgcaagtatgacacgataccggaggaagccggtgagaatgcgattccggtatccatcgcggatatggacctgccttgcgcggaaccgattatacgcgctcttcatgaacggatcgaccagaagattttcggttatacggtttatgagaatgaggaatgcaaacaggccgttatgggctggtaccggaagcgttttggctgggagatcgacaaacatgatatattcttcagtccgggggtcgttccggcgctggcatttttaattcaatttctgacgaaggaaggagacggggtgattatccagagaccggtttaccatccatttaccggaaaagtggaggctaacggcaggaaagtggtcaataatcctctcatcagaaaaggaaatacctacgagatggatttcgatgatctggacagaaaatttgccgatgacaatacaaagggaatgattctgtgcagccctcataacccggttggccgtgtgtggagagaggatgagttaaggaaggttgtcgacattgcaaagaagtatgataaatggattatttccgatgaaattcatgcagatttaacgagaatcggagttacgcacactccgttgttaaaacttgcgccggactacagcgacagaatcatcgtctgtaccgctccgagtaagaccttcaacctggccggcatgcagttttccaacattataatacccaataaggagtaccaggagcagtggacagaggtcgtctcgaaccgtttatccgttggcatgtgcagtccgtttggactgactgccatcatcgcggcttatacggaaggggaggaatggctggaccaggccagagcctatatcgatggaaatatccgttatatagaagagtttgtaaagaagaacctgccgaaggcggtgatgatggactgccagggcacttatctggtatggctggatttgaatgaatactgctccgattctgagaagctggaagcactgatggtcaggaaagccggcattatcttcgacgaaggttatattttcggaccggagggaagcggatttgaacggatcaatgcagctgcccagagaagtacggtggaagaatgcatgaagagaatgaaagcggcgcttgatactttataaggcacaaccgtttgagataagcagaaacacggtagaaatcagcaaaaagaggatgtcccatcagtctgcgtttacagactgccggatatcctcttttcactgcaaaggtttttcgggactttcgcttttcctcctgttcctgagggaaaataatggacaaggagcagtggaggaagaatggtgtataacttccatttatagtactaattccaatctcatatagtattttgcagaaaaatcccgtaatatagttgaaaaatccctttaaatgttctatgatgaagggaaatacatcagcatggtacagtgacagaacagaattgtgaagagggagacgataaagatgagttataatatagcggtaattcccggtgatgggattgggccggagatcattagagaggcaagaaaagtcctggacaggatcggaaccgtgtacggccatgagttttcttataccgaggttttgatgggaggagtatccatcgacgcgtacggtgttcctcttacggatgaagcattggagacagcaaaaaaaagtgattccgttcttctcggagcagtcggaggagacgtgggaaattcgagatggtacgacgtggcaccgaacttgagacctgaggcgggcctgttggcaatccgcaagggtcttaatttattcgccaatatccgtccggcttatctctacgaggaactggcagaggcctgccctttaaaaaaggagatcatcggcgatggatttgacatggtcatcatgagggaactgaccggcggtctgtatttcggagagcgccatacgacggaagtggacggcgtgatgacagccgtggatacccttacatataacgagaacgagatcagaagaattgccgtaaaggcatttgacattgccatgaagcgcagaaagagcgtgatcagtgtagataaggccaacgtactggattcttccagactgtggagaaaggtcgtcgaagaggttgccagggattatccggaagtgacgcttacgcatatgctggtcgataactgtgcgatgcagctggtgatgaatccgggccagttcgatgtagtcttaaccgagaacatgttcggagatattttatccgacgaagcgagtatgattaccggttccatcggtatgctgtcatctgccagcatgaatgaaggcaaattcggcatgtatgagccgagccacggctccgcaccggatattgcgggacagaacattgccaatccgattgccacgattctgtcggcggccatgatgcttcgtttttcctttgatcttgaccgggaagcggatgcggtggaagcggctgttcagaaggtattgtccgagggcttcagaacgggcgatatcatgtcggaaggatgtaagaaggtttccaccagtgagatgggagatttaatcacagagcggatttaacctgatacaagtacatagaaaaggagtgtcataatatgaagagtgattcagtaaaaaagggcatgcagcaggcgcctcaccgctccctgttcaatgccctcggaatgacggaagaagagatggagcgtccgctcgtcggtatcgtcagttcctataatgagattgtaccgggccatatgaatctggataagatcgttcaggccgttaagatgggagttgccatggcgggaggaaccccggtcatggttccggccatcgccgtctgtgatggaatcgccatgggccacatcggcatgaagtattccctggtaacgagagatttgattgcggattccacggaatgtctggcgaaggcccacgcgtttgacgctctcgtcatggttcccaactgcgataagaatgtccccggacttttaatggcagcggcgcgcattaatgtacccacagtgttcgtcagcggcggaccaatgttagcgggccatgtgcagggacataagaccagcctttccagtatgtttgaggcggtaggcgcctatacagctggcaccatgtcagaagaagaggtcagagagtacgagtgcaaggcttgcccgacctgcggctcctgttccggtatgtatacggccaacagcatgaactgcttaaccgaggttctgggcatgggattgcagggaaatggaacgattcctgcggtttactccgaacgtctgaagctggcaaagcacgccggcatgcaggtcatggagatgtaccggaaaaatataaaacccagcgacattatgacggaagccgcgtttaagaatgcgcttaccatggatatggccctgggctgcagcaccaacagcatgcttcatctgccggctattgcacacgaggccggcgtggagttaaacgtggacatagccaatgaattaagcgcgaagactccgaatctctgtcatctggcgccggcgggtcctacttatatagaagatttgaatgaggccggcggtatttacgccgttatgaaggagatcagcaagctgggactcctaaacctggactgcatgacagtaaccggcaaaacagtcggtgagaatattaaaaattgtgtcaacttaaatccggaggtgatccgcccggtagaaaatccatacagcaggacaggcgggatcgctatcttaaaaggcaatttagcgcctgattccgcagtggtgaagcgctccgcagtagcgcctgagatgttaaaacatgaagggccggccagagtctttgactgtgaagaagacgcggtggcggcgatcaaaggcggaaagatcgtggcgggcgatgtggttgtgatccgctacgagggaccgaagggcggtccgggaatgagagagatgcttaatccgacttccgttatcgccggtatgggacttggctcagaggtggcgctgatcacggacggccggttctccggcgcatcgagaggcgcatcgatcggccatgtgtgcccggaagccgcagtaggcgggccgatcgcacttgttgaggaaggcgatataatcagcattgatatcaataacaaccgcctggacgtgaagatttccgatgaggagatggcggcaagaaaggcgaaatggcagccgagagtaccggaggtaacaaccggatacttagcgcgttatgctgctatggcagcaccggcaagcaaaggggcaatcctggaggtaccggggaattaagagaaagggagtaaggcgtatgaataaattgacaggagcagaaatcgtaattgagtgcctgaaagaacagggtgtagatacagtatttggatatccgggaggaacgattctcaatatttacgatgcactttataaacaccaggatgaaatcacccatatcctgacctctcacgagcagggggcggcccatgcggcggacggctatgcgagagccaccggtaaggtgggcgtctgtatggcgacatccggaccaggtgctaccaatctggtaacggggatcgcgaccgcgtgtatggattccattccggttgtggcgatcacctgtaacgtggcggtcagccttctcggccgtgacagcttccaggaaatcgacattgcgggcattaccatgccgattacgaaatataattttattgtcaaggatataacgaaactggcggacaccataagacgtgcctttacgatcgcgcagaccggaagaccgggccctgtgttaattgatattacgaaggacgttactgccaatacctgtgattacgagtacaaggctcccgagccgattgtgcgccagaattccacaatccgcgaagaggacatggaaaaggcactttatttgatccgaaatgcgaaaaaaccgttcatctttgcaggcggcggcgcggtgattgcggatgcggcagatgagcttaaggcctttgcccataagattcaggctccggtggcagacagcctcatgggaaaaggtgcatttgacggaaccgatgagctctacaccggtatggtgggcatgcatgggacgaagacctccaacttcggaatcacggaatgcgacttactgatcgttgtgggcgcgcgtttcagcgaccgtgtgacgggcaatgcggccaaatttgctcccaatgcgaagattctccagtttgacgtggatccggctgagatcgacaagaacgtgaagacgtacgccagcgtgatcggtgatgtgaaaacgattctcaagaagttaaacgcacggctcgatccggtcaatcacgacgagtggctagctcatatcgaccggatgaaggatatgtatccgctccgctacgacaagaatctgttaaccggcccttacgtggtggaacagatatatgaactgacccagggcgacgcgatcattaccaccgaggtaggacagcaccagatgtgggccgcgcagttttacaaatacaaacatcccagaacctttgtcacatccggcggattgggaaccatgggctacggtctgggcgctgcgttaggcgccaagatgggatgcaaagacaagaccgtgatcaatatcgccggcgacggctgcttccgcatgaacatgaatgagatcgcaaccgcgacacgctataatatcccggtgatccaggtggtattaaacaatcatgtgctcggaatggtacgtcagtggcagactttgttctatggaaagagatattctcatacagtattaaatgatgcggttgattttgttaaggtagcagaaggaatgggggcaaaggcctaccgggtaaccagcaaagaggagttcatgccggttcttaaggaagccatcggacttaacattcctgttgttatagattgtcagattcattgtgatgacaaggtattcccgatggtttctccgggagcgccgattcaggatgcattcgacgaaaatgatctgaagatatagcagattaaaaaccctatcaaagaggaggaaagagatatgagcagagtgtacaatttttccgcaggaccggctgtactgccggaagaggtcttaaaggaagcggccgatgagatgatggactacaggggatgcggcatgtcggttatggagatgagccaccgttccaagatgttcgaaaccattatcaatgaagcggaagctgatttaagagacttaatgggcattccggacaactacagggtgttgttcttacagggcggcgcttcccagcagtttgccatggtaccgatgaacttaatgaagaaccgcgtcggcgattacatcatcacaggacagtgggcaaagaaggcatatcaggaggcacagctttatggaaaggcgaacgccgttgcatccagtgccgataagaccttcagttatattccggatgtttccgatctgccgatatccgaggatgcggattacgtttatatctgtgaaaacaacacgatctatggtacaaagtacaaaacgctgccgaatacaaaaggaaaaacactggtagctgatatctcctcctgtttcttatcagaacctgtcgatgtggaaaaatacggtctgctcttcggcggcgcacagaaaaacgtgggcccggcaggggtggtgatcgccattatcagggaagatttaatcacggaagacgttcttccgggaacgcctaccatgctgcgctataagactcatgcagacgcggcgtccttatacaacactccgccggcatacggcatctacatctgcggcaaggtcttcaaatggttaaagaaccgcggcggcttagaagcgatgaaggagtataatgagaaaaaggcgaagcttctgtatgatttcctggataacagcaggatgtttaagggcacggtagagaagaaagaccgctccttaatgaacgtgccgttcgtaaccggagacgccgatttagacgctctgtttgtaaaggaagcgaaggcggcaggccttgagaatttaaagggccacagatccgtaggcggcatgcgcgcaagcatctacaatgcgatgccgatggaaggcgtggaagcgctggttgcctttatgaaggattttgaagccagaaatggtaaatagggaagggagagacgcggaatgaagaagatatattgcctgaatgccatttccagcaaaggaacggctttgttaaatgaggagtatgagttaaccgagaatatgaaagaggccgccggagtgctggtcagaagcgcctccatgcatgagatggagcttcctgatgacctgctggctgtagcccgcgcgggcgccggagtcaacaacattcctctggatgcgtgtgcagacaaaggaatcgtggtatttaacacaccaggggccaatgccaacggcgtaaaggaactggtaatcgccggactgatgctggcctcccgtgacgtggtaggcgggatcaactgggtaaaggataataaagaagacgaaaatatcgctaaatccgtggaaaaggccaagaaggcatttgccggatgcgagatcaagggaaagaaactgggcgtcatcggactgggagcgatcggtgcggaagtagccaatgcggctgcatccctcggtatggaggtctacggatacgacccgtttatctcggtcaatgcggcatggatgctttccagaaatgtaaggcatatcacttccgtggagacgatctaccgtgagtgcgactacatcaccattcatgtgccgctgttggacagcacgagagaaatgattaagcgtgaatccctggcccagatgaagaacggcgtggtaatcttaaacttctcccgcgacgtgctggtgaatgaggatgacatggcggaagctcttgcctccaagaaggtaaaatgctatgtgacggatttcccgaatacaaaatctgtcaacatggaaggcgccattgtgattccgcatcttggggcatccacagaggagtcggaagataactgtgcgagaatggctgttgaagagatcatggattacatagacaacggcaatatccgcaactccgttaatttcccggcatgtgacatgggcgtgtgtcagatggcaagccgtgttgcggttcttcatctgaatattccgaacatgatcggccaggtaaccggaacactggcagccggaaacgtcaatatttccgatatgaccaacaagagccgcgataaatacgcgtatacccttctggacttagagtctgttccggacagcatgacgattcagaagctgaatgcgatcaagggcgtgctgagagtgcgtgtaatcaaataaacggtacataaaaactacaattcagacggggcatggaagtatccatggcccgtttggacgtaaaatcaaaggagaatagaatggctgttgtaaaaccatttccgtgtgtgagaccggataaaaagtatgctgcctgcgtggccgcgcttccttatgacgtgtataaccggaaggaggcgaaggccgccgcctccgccaatccgaaatcatttttaaatattgacaggccggagacccagtttccggatgagttggatatgtatgacgaccgcgtctacgataaggcaaaggagatgctggagagctggattgcagacggcacttttgtgaaggatccgctggcggcttattacatctatgagcttacgatggatggaagaaagcagacagggatcgtggcgtgctcctccatcgacgattatgtaaatggagtggtaaaaaaacacgagaatacccgtgaggaaaaggaactggaccgaatcagacacgtggatgccacggatgcgcagaccggcccgatctttctggcgtaccgttccaatgcgatgattaataaggtcgtggatttaaagacaggaacagagccgttatatgactttaccgcagaggatgggattcgccaccgcgtatgggagattggaaatgcagattctatcctgacggtggaagcggcgtttgccggtattccggctacctatatcgcagatggacaccaccgtgcggcttccgcggttaaggtggggctgaaaaggcgggaagagcatccggactatacggggaatgagccgttcaactatttcctgtcagtcttatttccggatgatcagttgatgatcatgccttataaccgtgtagtaaaggatttaaacggcatgacggaggagacattccttaagcgtgtagaggaggccgggtttacggtggcttccatggggacagaaggctttgcccctgtggaaaaagggacctttggaatgtatttgtgtggacaatggtactgccttacggccgcagagcgccttttgaccagcgatccggtgaaggggctggatgtttccattctccaggatcacttactgggaccggttctgggaatcggggatccgcgggtagataagaggattgattttatcggcggaatccggggactttcagagcttgaaaaacggtgtagagaggatatgactgtggccttctccatggttccgacttcgattgaagagttgtttagcgtggccgatgcaggcctgttgatgccgccgaaatccacatggtttgagccaaagctgcggagcgggctgtttatacatttattgagcaagaggtagcgtgaagtgagagcaggtacggttttaaacgggaatggaacggggaggtaaatatgaataattttgagtattgtgtcccgaccagagtgattttcggcagagacacgcagaaacgggcaggagaactcataaaagagtatggtttccggaaggtcatgatccactatggcggcggcagtgtaaagagaagcggccttttggaccaggtgacggcatcgctgagagaagcgggcattgaaatggtactttttggcggagtccaggcgaatcctacgctgtctaaggcgttagaaggcatggagatctgccgccgggagagcgtggactttattctggctgtaggcggaggaagtgtcatcgattcggcaaagtgcattgcggatggggcgccgaatccggaaattgatccatggaaatttttcatgaaggaagctgttccgccgaaagcgctttcacacggcaatatcctgacgctgtccgcctcggggagcgagacgagccagtcctgcgtgattaccaatgaagagaatggcttaaagcgcggctttaactgcccggctcaccggccgctttttgctgtctgtaatccggaactgacctttacggtgagccggttccagacaggctgcgggactgtggatattctgatgcatacgctggaacggtatttaggcggaaccacaaaggacacggcgctgacggatcgcatcgcagaggggcttatgaaggctgtgatcgaggcggggacagaggcggacttaaatcctgaagattatgaggcgagagcgacactgatgtgggcgggaagtctttcccataatgatttaaccggattgggaagggaggtcatgatgaccgttcatcagctggaacatgaactgtcgggaaaatatcctgaggtagcccacggagccggtctttctgcgctcttctgttcctgggccagatatgtctgcagagatgatcccatgcgctttgcccagctggcggtccgtgtctgggatgtggagatgaatttcgagaaccctctaaagactgcactggacggcattcagagaatagaagactattttaagagtctgaatatgccggttcgtctctcggaactggcggtggatgtgaaggaagcagactttgacgagatggcagaaaaatgcacgaactttggcagacgggtgcttccgggaatcagggaacttgggaagcgtgagatgatggagatctatcggatggcactttaggggcagagataaggcagacggattacgccgtttaacggcgttttccgtctgccttatctacatcccggaaggcttctgcctgcgggccggaaatatgcccggcagccatgcctggctaatcgggaatatgctgttcctccggtaagggagcgtgggggacgaagttttccgggatatccggatccttcatatcgtaaatgcggtcgtactctttggtttcctgatccttgagcgtctctgagcggttcatggacaggaacttcgtgagctcgtagcagtccacccagatttcgttgtttccctccttctgagattcgtcaaaaataagctgaaggccgaaatgcaggtgggcctcatcaatattgttggtgttctccgttcggctgtaaccggtccgtccaagataaccgatgacgtcgccggctgtgatgatgcttccctgtttcagcgatttatggtagggatagttttttcgtaaatgtgcgtaatagtagtagcgttttccgtcaaagctgcggatacccagcctccagccgccgtactggttccagccgatggcttctacatatccggactccacggcgattacgggggttccgacctggcccatcatatcgtggcccagatgctggcgcttatagccgtaggaacgggagacgccgaagtcatcatagtcctgatagggaaatcccttggcaatgggagagaaggcctttaaaccgtatttcgtgacccacacccggtccggatccgccgtaccgtcggcattgaccacgggggaggcgaataaaggcgcgttttccgcggcgatctggatgtcgtactggccgacgaggccgtctaaaacagcgccgtaggcctgacggtaataggaataatacttcatgtttgccgtcagctcctccatggtttttccggacagaagctgttctgccagtgtatccaagtctttagtggaatatcgggaaaagtcaccgccgtacctggcacccagataggagagcagctccacccagtttaagtgcgggctggactggcacgtattgacatcgtaccggaaggcctcctgcatggctttggaggtaaccttaaagtccacccatttaatatagttccgggcctcagaggacgtggcttttccgtcctgattcgatgcgggaaatgagaaccttccctccgggctgatcagaaaaagggaaactaaaaggcacgtcagtacaatgacctctatgtatataataatgtgatgcagagtctccggcgattctgcgattcgttctttccatgatttcataagaaaatctcctccatctcatcctatgcagagacgggggagaatatgaaattttatgaaagaggaatgatgtcttcatcgcggggaacaaagattccgccatggaaccattcagccgcttctgccgtgtaacgctctctgcggtggtctaaatccgtgtcctcagtgtgccacagcacgatatgttccaccttcatatcctgggcggtccgggcagcgtccctggcggtactgtggtgtttttcatacggtttaaaccggtccctgtcctcatacaggcagaatgcctcatggagcagccaggcgctgttttccacgtagggggcacagagcgggtgaaacggctcatctccgcagcaggtcagccttcgtccgtctgagagaacggcggtgaaaccgaactgcttcgctttggtggaatggatgtcaaagaaggtaacgtccatgcccagaatctgccgctgttctccgtcagagacgggaatcagcacgatgcggtccccgatgagccggcacagcttctcctgaagcgtcagccggcacagggtttcaatcgccggcagtaagtcctcatggctgtataaatgcagctgtccctcataggaaccgtttaaaatcctggtaccgataaagcgcaccatccagacgatccccaggatgtggtctgtgtggctgtgcgtgacgaagatatggtgaatgcgggtcatgtccacattcatgtcctggagaatcctcagtatgccgttgccgccgcctgcatctgtcatgaaaaattctccgtccttttctacggcaaagcacgtattataacaccgtgtcacggcggcgtgaccggttccgaatacatataactgttccatcttctgcctcctgatttccgacagccgggaatgggctgtcctgtgtatgaatgatcctgtgtatgaattgtcctgtatgcaggttttcctgtaagtatgttactacaactgaaaggaacctgcaagtctatccggccatggattccgtaattgccgtctgttgaatttacgcggtttctgccgggctaaaggggctttcaaaaggcagtgttttatgttactattattttattagaaatgcagctgaacggcgtgtaacaggagaggaggcatattgcggtactgccggcagcggcatgatgggtgaggagagaggattatgagagacttagcttacttgaagctgatggcgcgggagtatccgacgatcaaggcggcctccagcgagattattaacttaacggcgatccaggggcttccgaaggggacagaatactttttcagtgacctgcatggagagtatgaggcatttatccatctgctccgcagtgcatccggtattatcagggaaaagatcacggagacctttggacacatcattccggaaaaagaagaggtggaactggcaaacatgatctactatcccgagcgggtggtaaaccagatgcagttaaagggaatggctactgacgactggcagagagtggccatctaccgtctggttcagatctgcaaggtggtttcttccaaatacacccgttccaaggtgagaaagaagatgccgccggaatttgcctatatcatcgatgaacttcttcacgtggattataatgacgacaataaacgggtatactacagcgagattatccgttccatcatcgacatccgggtcggagataaattcatcatcgcgctgtgcgagctgattcagaatctgacgattgacagcctgcatatcattggcgatatctttgaccgggggcccagagccgacattatcatgaaggaactgatgcagttccacgatgtggatatccagtggggaaaccatgatatttcctggatgggggcagcaaccggcaatctggcctgcatctgcaatgtgcttcgcattgcgatcagctataacagcttcgatgtgctggaggacggctatgggattaatttacggccgctctccatgttcgcggctaaagtttaccacaatgatccgtgcgagcgctttgttccgcagattctggatgaaaatatttatgatgcggtagatccggggctggcggcgaagatgcacaaggcgatcgccatcattcagtttaaggtacagggacagattatcgggcgtcatccggagtatgagatggatgacaggaggcttttagaggccgtggatttcgaccggggagtggtggtgctggagggaaaggaatatcccatgctggatttatccttccctacggtggatccgaaggatccgcttgcattgaccgcggaggaggaagagcttcttcatacgctccagctttcgttcaggcataatgagcttctgcacaagcatatccgtttcctctattcccacggaagcctgtacaaatgctataactcaaacctgctctaccatggctgcatcccgatgaaggaggatggaagctttgatgagatcgtggtggacggcatctcctattcgggacaggcactgatggactatgtggacaggaaggtgcagaacgcgtatttcatggcggaggaatccccggaaaaggaggacgccatggactttatgtggtatctgtggtgcggagccaaatcgccggtttacggcaagggaaagatgacgacctttgagcactattttatcgaagatccggccactcataaagaaccgatgaacccgtattaccggctcagcgtgaaggaagagacgtgtgaccggattctggaggaattcgggcttccaaggtccggttcccatatcatcaacggccatgtgccggttaaaatcaaagagggagaatcccccgtgaaggcgggcggaaagctctttatcattgacggcggcctatccaaggcgtaccagtccaggaccgggattgccggatatacgctcatttataactccaatcatctggctctggcggagcacaagccgttcgatccggagaaggagagcacgcccagggtctccattgtggagaatatgcataagcgggttatggtggcagacaccgacaagggcgtggagctggcaggacgtatcgcagacttaaaggaactggcaggcgcttacagagaaggcatattgaaggaaaaagtagaataattatgaaattttaataattaatttacagaagattcctttacgaagccagggggaaatggtatactaggaaaggtcagttactttactgaaggaggcttcaatgagcagacaggaatttttacagcgtttgcgggacacgctgaccggcgaagtgcctggaaatgtgattgaggaaaatataagatactatgacgattatatcagaacggagaccgcgcatggccagtcggaagacgaggtgaccggtgcgatcggtgatcccaggctgattgccaagacgatcatggaggccacggagaacgccagagagggcggcagccgtcagtccgcatatgatacgtatcggaacgaaggccggacggtgtatgaggaagaggccggaccggaccgccatttccattttgtcgatctaaacaaatggtactggaagctcctggctgtagtcgtgacagtgttattcttcttcctggtcgcaagtatcgtgaccggtatattcagcattctgattcctctgatgggaccgctgcttctgattcttcttgtaatctggctgatccggggccccaggcggtaaaggaatatattaaaaacaaattataaatattacaaaagtgtaacggcagttataccggaaaaatcggtgtaactgccgtttttgctgatttttacttgacatatggcgatgagtagagtatactgatttttgtaacatttatgtaacatattacatattgataaacaaacgaaataaaaacgtaagaatcaggagttggaaaaacatgggaaacaaaacctggaaattgctgggggttatcggcctctatgcggttctggcctggaattcaccagttaccgcaaaagcggcagagattgaagtggaaacgagtacaacactgtatgcgaagatagatgcgccggacgtcgtggtacggaaggctaagaatgcgggcggagaggcggttacaaaagtatcgcggggacagacttatgaagttgccgcaccggcagaaggcggctgggtgaagatcagcaccgcagaaggagaggggtacataccgagtaaccgggcgaccctgattgagaagacaaaggaaaaagtcgatgagagcgtgaagctgcgccaggacgtggtcaattatgcgcttcagtttgtagggaaccgctacgtatatggaggaacagatccgaataccggagccgactgttccggattcacaagatatatcatgcagcacgcggcaggcatctccttaagccacagctccagagcacagtcgggagagggtcgcagcgtcagctacagcgacaggaagctgggcgatctgatcttctacggcggcaagggctatatcaaccatgtggccatgtatatcggcaacggacagattgtacatgcttccacggagcggacgggaatcaagatatcgaacgcaacgtaccgcacgcctgttaaggtggtcagggttctggactgatggagaaacctggaaaataatggaatgttaccagtttgaaatagtacttgactgaaaagcaaggtaaatgtataataaacgtaatgattttaacaattacgtaataattagaacgaaaaagtaaaaaacaggagtaatgtcccaatgataaaaaatgcatggaaaacgttaagcctcctggctttctgtggagcaattgtacttgccaatccggcagatgccaaagcggatgaagtttccggaccaggactcagttcaggtaattatatcgcaacagttgaagcagagactgtgaatatcagtacggatgagagcggccaggaggtattgatggcagcttctaagggatcttcctttcaggtcgtggaagacatgggcgacggatttgtaaaagtaaaggtgaaggatacatacggatatcttccggtcgacgggaatgcgactgttacccagaccgatgaagctaccattgccgcactggaagcagcatatgatgctcctgcggagttccggcagagtgttgtcaattacgcactgcagtttgtaggcggacgatacgcctatggcggcagtgatccccataccggagtggattgctccggatttacgagatacgtcatgcagcatgcggcaggtatctcactgaaccgttcttcaggcggacaggcttcccagggagttgctgtgagttctgaccagatgaagccgggagatttgattttttatggaaacggaaggtcgatcaatcacgtagccatgtatatcggcaacggacagatcgtacactcctccacctacaaaacgggaatcaaggtttctccgtggaattaccggactcccgtcaagatcgtcaatgtcattggcgaataatggacaagcggataactggattttcgataagggatataagactcccggcactggctgccgggagtcttctgcatccgatggactccggaatcgtacgataaaaaggaagagcccggataggggagctatccggactcttctgaggggagtataaataattaataaggatgaggaaatctaattcctcactttaattataatataggcagataaaaaaagcaaagttattttaaaatttttttgtatattatttgaacagtcagccatactaacggtgtaacaaaaaatccgacaggaggtatcataagatgtccaataacaactacaatgataactacaacgattgcagcaattcttccagaaacaacagccagaacagcaatcagaacaacagccagaacagcagccgcaacagcagcaagaacaacagccagaacagcaaccagaacaacagccagaacagcagccgcaacaacagccagaacagcagccagaacagcagccgcaacaacaaccagaataacagccagaataagtctgactattaatctgtctggcagtacgaaaataacagcctgtcagtaggcttgtgatttcgtcaaaaagcacagggatacgatgcttataagcataatctccctgtgctttttgctgttctcttaccttttatgcggcgatgaccagaaagataaacttttcacggggagtgaatataatggtattagaaaggacaggtgattgtatgttcaagacaataccgattggtgaagtcgattattatatagaaaacgaaaacgatatgatggtgattgacctgcgtaacgccgcatcgtatcagagagcccacataaatggggctgtcaatatcccgtatgaagagatcgatcagagaatttcagaattgcccagggataaaattctggttttttactgcgcaagaggcggacaaagcatgatggtatgccgctatctgtcccgcatgggatattcggtgctgaatgtggccaatggaatcgcctattatcggggaaaatatctggttcgggggtaaattcattgacagatgcgccctgtaagacttaaaatatacctattaatgcaagaaggagaatttacttatgaaatatatgattgcgtccgatatccacggttccgcgttctactgcagaaagctgctggaagcgtttgaggaatcaggagcgaatcgccttgttttactgggagatatcctttatcacggaccaagaaatgaccttccaaaggagtatgcccccaaagaagtgcttgccatgctaaacggctgcaaagacaggatctactgtgtcaggggcaactgtgatacggaggtggaccagatggtgctggaatttcctgtgatggcggactatgcgctgctggcgattgatggaatcaccatctatgccacacatggccacgtttatcatgagaatcaccttccacccatgcagaagggggatgttctgcttcatgggcacacccatgtgctccgggcggatcggtgcggggatattaccatcttaaatcccggttccgtatccataccgaaggaaggaaatccgccgacatacgcgattctggaggataggatctttcggatcctggatttcgagggatgcgtgattaaagaaaagaacctgggagaataaagtgaaaaaaacatttgaactcattgcaccgtgccattttggcatggaggctgtattaaaaagagaaattacggatctgggctatgatatcacgctggtggaagacggccgtgtgacatttatcggagatgaggagaccatctgccgcgcgaacatatttctgcgcacggcagagcgtgtcctgctgaaggtgggaagttttcatgcggaaacctttgaagagctgtttcagaatacgcggaatattccgtgggaggaatatcttccccaggacggtaagttctgggttgcaaaggcgtcctccattaaaagtaagctgttcagcccctccgatatccagtcgatcatgaagaaagccatggtggaacggatgaagaaggcgtacggtctggaatggtttccggagacgggaagcagctatccgcttcgtgtatttttgtataaggacgaggtgacggtcggcatcgatacttcgggagagtcgcttcataagagaggctaccgtacccttaccagcaaggctcccatcacggagactctggctgcggccctgatcatgatgacgccgtggaaccgggacagaattctggtggatcccttctgcggaagcggcaccttcccgattgaggcggcgatgatcgcagccaacatggcaccggggatgaaccgttcctttctggcggaagactggaagaatgtgatcccgaggaaattctggtatgaggccatggatgaggcggcggatctgctggatacagaggtggaagtcgatattcagggttacgatattgacggggagatcgtgaaggccgcgagagccaacgcggagtctgccggagtggatcatctgattcattttcagcagaggccgttgagcgccctcagccatccgaagaagtatggatttattattacaaacccgccctacggcgagagaattgaggagaaggagaatctgccggcgctgtataaggagatcggtgaacggttccgcgcgctggattcctggtccctctatatgataaccgcttatgaggaggcggaacggtacgttggaagaaaggcggacaagaaccggaagatctacaatggtatgatgaagacgtatttctaccagtttatgggaccgaaacctccaaagcgcaaaacaggagattaattgattgaaggcaggaaaatggttgggaacggcggccgttctggtgctcgccggtacggctgtgatctggattaacggccggtggccggaattaagcggtccggggcaggaatcggccgttacaggtaccggagagacaggcacagaatcccaggaggacagtggagagcaggaaagcgcaggacggagcagcagggagagtcacggaccattggagccggagtcagaaagcagcgcggaacgtgacggggcagtatgggaggatccggtgcaccaggtgcttccgtcggcttatgacggccgtacaaccggccgggcgccttccattaagaatcagggctctctcggaacctgctgggcatttgcatcgctgatggcgctggaagcgcgtttgctgcccgatgagaactatgacttttccgaggaccacatgtccctgaataatggattctgtattccgcagagtgatggaggggagtacaccatgtctatggcctatctcctgtcctggaaggggcctgtcctggaatcggatgatccctatggagacggggtctcacccgatggcctgaaggcagtaaagcatgtccagggagtggagctggtgccgggaaaagattatgaaaagattaagcgggctgtcttacagtacggaggcgtacaaagctccctctatacttccatgacgaacgaggaaagcaggtccgcccattataatgaggatcagtacgcctactgctatatcggatcggaaccgccgaatcacgattctgtgatcatcggctgggatgacgggtatccgcgggagaattttaatacggaagttaacggcgacggggcctttatctgcatgaacagctggggagacgattttggagacgacggatatttttacgtgtcatattacgactccaatatcgggctgaacaatattatatatacggacgtggaagatccggatcattacgatcataactaccagacggatttaagaggctgggtgggacagctgggatacggttctgatacggtatggttttccaacgtttatgaggcgcaggggaaggagacgctaaaagctgtgggcttctattccacggacaggcattcttcctatgaggtctatgttgtgagacagcctggagatgaggaagccataaagtcaggggacggtttccggaaccggcggctggcggcgtcgggaaatctcgattatgcgggcttttatacgattcctctggaagcagaaccagaggaaggactggagcttgaaccgggggagcggtttgccgtgatggtaaagctgacgacaccggacagcgtccatccggctgcgatcgaatacgatgcgggggatggaaagaccatcgtggacatcagtgacggtgagggatatatcagtcctgacggggtgaattttaccagggtcgaggaggagcagaaatgcaatctctgcctgaaggcctataccacggactggccgtaaacagtaacgatgaatccgttttatgaaggagagtatacagatgagtgagaacaggatcgtatttgccacaggcaatgcgggaaagatgaaggagatccggctgattctggccgatctgggaatggagattttatccatgaaggaagccggagcggatccggtgatcgttgagaacgggaaaacgtttggggagaacgcggagatcaaggcgagagccgtgtgggccgagacggggggaattgtccttgcggatgattccggcctggtggtggactgcctgggaggtgagccggggatctattcagccagatatatgggcgaggatacgtcctacgagatcaagaaccagaccattatttcccgggttaatgaggcgccgggggacgacagaagcgcccggtttgtctgtaatatcgcggccgttctgccggatgggcgtgtccttcatacggaggagaccatggagggaatcatcgcagagaaggccgcaggaaacggcggctttggatacgatccaatcctgtttttaccggagttcggagtgaccagtgcagagattaccgtggaacagaaaaacaggatcagccatcgcggaaaagcgcttgaggcaatgaaacggaaattggaagagctctataagggggatgtacgatgaagatattaattgtgagcgatacacaccggaaagatgacaacttaaaaaacgtgatcgagaagacatctccgcttgatatgctcattcatctcggcgatgcggaaggcagtgaaacgaagatcgccggctgggtcggagaaggctgtgatctggagatggtactgggaaacaacgacttcttttccaatctggacagagaaaaggaattgaagatcggagaataccgggttttactgacccacggccactactacaatgtgtctctgggcgtggagcgtctggaacaggaagcgagagaccgccggctggatatcgtcatgtacggccatacccacaggcccttctatgaggtgcggggaggtgtgaccatcttaaatcccggaagtctgtcttatcccagacaggatggaaggaagccgtcgtttatgattatggaactggatgatcagggaaaggcacattttaccttaaactttctggagccgcagtaccattagaggctttggaaaccagtgccagtacttttttatagtcctccggcgtgtccatatcgatgatacaggtctcatcttctgcggagaaatactccgccccgccgttaaacggtgtcagcgcccccttgagtcccgcgccgccctgataagagagaatcccaggaatgcaggcagacgaaataaccggaggatggcccttgcgcatggagaaagagggatacaggacgaggggctccgaacgctgaaattcttctatcagatctgcaatcagtttacgcgttaccagcgggtagtctgccggcagaatcagaaatgccgatacgtcccggtcaagagccagaatcccggcctttacggaggtgaacatcccttccgcaaaggccggatttctgactgtgtctgcatggcagccggataaatgcgcttctacttcctctccgcggtaaccggttaccacgatggtccggtcggtcagcccatgaaggatatcagcctgcctccggatcaccgtggtttcccctatgggcagaagtggttttaaacgtcccatcctggaagagtagcctgcggctaacagtattgcttcgattctgcccatctgtgcacctcctatctggcattcagcagggaattgcgtaccagtgtttttgctatttgaactttataaccgttccgtgaaagcggcagtgctcctgaaagggcgatctccgctgcttcggcagccagttcctctgtgactgttttccctgtgatataggcttctgcctctctggcgcgcagcgggatcggagctacggcgcccagtacaatccgggcatcggtaatgacgccctcctgcatcttataagcggatgcgacgctgactacggcgaaatcatgggaatccctgacccggaatttatcatagccaacccggtattcctttgtcgatgccggaatgcggatctcagttacgatttcatcctcctcaaccagacggcagtgggatttcttcatcatttcttcgattggctcttttcgtttgctggttacgatctccgcatccattgccgtgagtacggtggctacatcggagggattcacagcgagacagccgcagttaaagcagcgttttgcctcttcctgcacctgttcccacgtaagtccgtaggaatcttccagatgaagtccgcgctcctccttcgggcgttccggaagcctggctccctgggaatggccggtacaggaggcgtcaaacgtaatcaggcctccaagcggatgcttcgcatctccttccggatctccggtcataaagcaatggactgcggccgaagctttcttgccgtctgcgatggcgtccactactgttttgggcccggttgtgacatcaccgacagcaaagaccttatctacgctggtcttcatggttgcggggtctacagaaatcagtccgcggctgaccttaaactccagttcctcaccaaggaaggagaggtcggttttctggcctacggccatgagaatggagctgccgtgaagtgtggtggtctcattctcatcgtaagacggggcaaaatggccctgctcatcaaagactgcagtacactgttttaaaacaagtcccacgatttctccgtggtcgcggagaatctctttcggtccccaggacggcaggattgtgattccttcttctctggcccggttgagttcttcctcgcttgccggcatctgatgctccggctccagacacgccatgacgacattggcagcacccagacgtttcgctgtgattgccacgtctacagccacgtttccgccgcctacaacgatgatgtctctgccgatcttgctctccatccatttattgacttcgatcaggaaatccaggccaaaggtggtgagctcttccccatcgagtccgataaggggccgcttccatgcacccgtatttaaaaatacgctgtcatactgttccaccagatcgttgaccggtatatcctttccgatttcaataccggtcaggaattcgattcccatgtgttctaaggaggcgattaagtttctgacgatatctttaggaagacggtattccgggatcgcatagcggagaagtccgcctgcttcctccattttgtcgtatacacggacgctgtgtccgcggcttcttaaatagaaggcagcggttaaaccagcagggccggagcctacgatggcaacacgttttccgctgtctgtttttggcggcgccataaaacgattgctgtgttccagtatgtagtcgcccacgtaccgctccatgcctccaatattgacgtgttcgtcgtattccttccgcttgcagttcatctgacagaaatgggtacagacacgggaggtgacagcaggaatcgggttggcttccagcaggatcgaggcagctccgtccatgtctccggcgcgcagcttagccagatattccgggatgtccacatgggcggggcagttggaagaacagccgcttaaatggacttttctggccccaaagatggagtggttcttattttctccggtcattgcgttgcaggtatctccaccctttcggagacactgaattctgccgccgatctcgtcgggatagcggtaataccagcaccggacttcctgacagagattgccgccgatggtggctaagttgcggatcaggggcgttgccacgcttctcgcagcgtcagccagcgcgccgtattcttcgcggatcagcggtgaggacgcgatatcacagagtttggcagttgccccgatctttaagccgtcttcgtcctcctctatgcggtccagtccgtcgatggatttgatattgacaattgtttccgggtaatccggttctaatttatgtttcagaacgctgagcaagtccgtaccgcctgcgataatccgggcattgttctgttcgtcctttaaaatgccggcggcctggcttaagctctccgcatccgtatggttaaaatttttcatttggtgttcacctcgcctttcctaacgctttcaggatttgatccggtgtcagaggataatccatcagctgaatgccgattgcattggaaaccgccattatgatggcgcccggtaacggagcaccggatatctctccaactccgattcctccaaatgcgcttaaatcgttgggggtttcttcaatatgggtttcaaaggccggaagatccgggaagactctccatttaaaatcaaccaggttgttggtcaggaactttccggtcttttcgtcgagaatcatttcctcgttgatggcactgtcgcttccgcagcttcccaggccgccttccagctgcatctttaaggaaaacgggtcgataacctgaccgacgtcggtgccctctaccacgcgcacaattctcacatcgccggtgtcggtatccacttccacctctacgaatgcgatcatgaaacatggcttggagtgatccatctcgaagacgccgtggccggatatggtgttcatcgggcctaaaacggcaatccacggaagcgccacctccggattatccttcatgaagatgattccgtcccgtgtatccagcatttccgcagggcagtggagaatggcggccgcggcttctaaaagctgctttctggcgcttcgggcagcgtcgcctaccatacgcccgtatacaagggtgccccgcgaaccggccagtccccagtcccatggattgtcctggctgtcgggagtcgatatggttactttatccagcggcagattcaatatttcagcagccatctttacgacggcagacctctgtcccatgccggattccgcgatgcagacgttgatattggctgtcccccatccgtccagcttgacaaaggcctcgccgtgaagcattccgcagtcggcgcttccatggacgcagcagcctgcgccgtactgtttgcttccttcggttttgtacggctttagccagccggggaaattctccttccagccgaaatgttcggccgcgtgatccatgacatcgttatagcttaagaaatgattttcccaccagtgtccctcgacccagtagtaaccgccgttgatgtcacacatatttttcttgaaaaaatcaaccggatccagattcatttgcgccatggccatggacagaaccggaacgagtgatgcgtaggattcctgtccgccgaatccgcggataccgccggaacggcagcggttggtggctaccaggtggggctgataattccagtgtttgcacttgttgagcagaagcatggcgcgtcccaggccattggcaatctggccctggccgaaatcggagtgaactccggaaccgaccagccacgttccctcataggcgtgaaccgttccgtcggccagcagtcccactttagtggtcagacggctgcctaagcggagcatataggtggagagatgcgcttccttggagatgaccagcttcaccggtctgccggaggctttagccagggcggcacagtagagtccctccatgggaaccgtgtttttgcttccgaagcttcctccgacattggcagaaatgacgcggacattgacattgggcatggcaatctgcatgatcattttctggatgttggggctctggaagctgcctttcatattgcactggtttggtccgtcccaccaggcaacgagaccgggactttcagccggaagcggattggatatggtctcatactttgaggtcccttccacgacgacggaacactcctcaaagccttttttggtgtcaccaatgaccagctcctgaagcgctttggggccgaaaggcgggcagccccgctctatgatattgcccgggaactgctcatacagctggggggctccgtcggcgatggcctcgtctaagtcctggacagcgggaagcacctcatactccacttcaatcagttcagcagcctcctcggcaatccggtttgatgtggcggcgatcagtgccaccggatcgccgacaaaacgcacatgacggtccagaagccttttctgtgccggcatacccgtaacccagtcaaaggcattttcgtaggtcatgatggttctgacgccgggcagctccagggctttgctcacatcgatctttgtaatcatggcgtgaggatgggggctcattttaatccgtccgtagagcattccgtgcatatgtatgtcgttcgcgtactccgcggaacctgttacaatggccttgccgtctattcggggagtcggcttgcccacatatctgaattccttacccatatcattcactcccttccctggcggcctgcttcacggcctccagcacctggtaatggctgatgcatctgcagtagtttccggccagagcctccttgatctcttcttcatccggatgcgggttttccgccagcagcgcttctgtcgtcatgatgattcccggcgtgcagtatccgcactgaaaagcggagtgatcgacaaatgcctgctgcaccttatccagctctcccgtattcgggtcctggagtccctcgatggtgcggatgtcggcgccgtcacattcgatggtcagcaccgtacaggacggtatggctttcccgttcatgatgacggtacagcagccgcaggcgccgtcatcacaggaaatcttggttccggtcagcagaaggcgctcacgcagcgtttccgccagtgtgtccgcaggggcaatatcacccactgcatttcccacgcccagccggtatacatcaccgttgacagtgatggtgaccgattttttgttatcacccataattttataacctccttacaatggtatttttaattgatcaaaccatattgacaaaaatatatcattaagcctaaaataactataacacaggtgtgagtcaggcagtctacaaaaagtgagatacgtttttgtagggaaaggagcttcaccggaaatgaaattaaaacttgagtatctggccggatgcggggcattcacagcgtgctgttttcggacgccgttttatgggaaagaggtcagccgcctggaattgatgtgcggaaatggggcggctgtccgggagccgcagagtctgcttctggtatgcagggggctgattccggatgatggggagaggctaaacgagtggctgaatgagcgaaaggcacaggaggcagccgggttacttgcggacttatccggggagagcgaggagaggatctcgaagctggcagaggcctgccgtgaacgggaactggttttcggaactgcagagacggccggatttacggctctgataaacgattattcccatttgattgcctccagaacggatggagcggtaaaatcatatgacagggtgctggaggaccttcagcgcaggttctataccagcggaacggattctctcttagaggggctgagctactggacaggctgtcaggctgcgctgattgtggggcaggacacgtttgtgaagccgtcggttcccgtactgaatgaggcggttttctagccggcctactggaaaaaggagccccgaaagtccgggttatcccatgtgagctgttactcctcatcgttttcggataatatgctgcttcaggcggaactgtttaaaaaccgtctgccgttcggagtgctctgccttcttggagacgaggacgtattcgagccgtcagacgatattctgctgaactatgcctccattctctgcaccggcatcgacgattacaaacggcgctcccgccggattgaggcggcagtcgaaatgatctgcggcggccagatgccggattcctctgtgatggagctgtttccggaatcgggatatgcgctggtgctgtgtgatcaggaggcaggcgaaccggcggagggaaaaaaagagtatttgtcttacctgattcatcactattttccccagaagctttgttacagcttttcggcggaggggagtctgcgtctctttgtttcggcggaagacgtggaccattttgcccgccgcctgctggctattttagacggcgccggcaaacggtgcagggcgggggtaagccggcattatcctgcttcccaggcggtcaccgcgttctttgaggcggaaagcgcggcgcatattgcaggactattggagtatggcgagcacatctgttattaccacgatttaggcatctaccggctgctcaactacccggagaattcgtggcccatcaatcagatgctgggggaaatggacgagcttttaaatcagatggacgaggaaaaacgggatgtccttgccatgaccataagaacctttgtcaaatgcagattccattatcagaagaccgcggacaagctgtatacacacgtcaacacgatccgataccggattaagctgatcgaggacttgtgggatgtggacctctccagcgatgaggggagacttctgttcagtgtgctggcgaagctgcttccgctgtggatgaagagtgggtgttatagtgggacgatgccgagggaaggggagtgagaatgggtacgcctcagagcttgtggagagcgggagggaggcaggggcgaaggggttcttgtttcctcggtggcaggaactaaagcggaaagacgggaaaaggaaccccttcacccctgcctccctcccgctctccacaagctctgaggctgtgtactggctatgggaggggaagataaaaggtgcttcgcttttggggatataaagcgaagcacctttttatcttattttatttccagccgtcggggagatagtttatggtgttggcgatcatgtcgtctaccagggtttttacttcttcctcggatgcgcgtccttttacaaggggatcggcaaggaaggcctcgcagacgaggctgcggtcgtatgtaagggcggcttttaggattctctcatgattttctacatgaggggtgattaaggcctttacctgctccgggatggctccggcgacgatgggctggatgctgtctaaactgaatacggcattggtctctaccacggcgtcggctgggagattggcaatctgcagcgcagtattcgggatattgacgttgctgatggagcgctccaggccgcataaggacttgattaacagaattccttcctcccctgagggctcaagcttgatctcttcttcaccggaaacgagacggtggctgcggtcgagacgcttctgtaaatcatcctttctccagtccactgtggtcaggccgaatttccaggaagctactgtctcgggatcttttaaatactcaccgcccggcatgaactctgccaggtgacggtcgcctgcggcagcaatgaggccatagcggcggaacaaatcaaattttacgcggtgagcacagtcgaaagtgctgttggcccagttcttatccggttcgttgtagccttcttcgtagtggctgtcgatgtagtcgcggtaaaccgggaagagatcgattcccttataggaagccttgtcgagccacgtaaaatggttgatacccagcacgttgatgttgatgtcgcggcggtcgatgctgtcgaggccaaaggtttcctcacagattccctttaataccttctgggtaccgaatacttcatggcagcagccgaatgccttaatctgagggaatacatgatacagagttttgacgcataaggtcatggggttggtgtagttgataacccatgcttcgggcgcgtattttttgatggcttccgctatttcgacgaacatgggaatcgtacgcagagcgcggatcattccgcctgggccggcggtgtcgcctacagactggtagattccaaggcgttccggcagatgaacgtcgcttgccatctcatcaaaggtgccgggcagaatggaaatgacgacgaagtcacagccggtcagcgcttcacctatggtgctgcaggtaacgtaatcccattttccggtggtgtcttctctggaagtcagcttatttccaatgatttcgttgtttttggccgcagcttcatcgatgtcgtaaagacggatggttccgcctaaggaatcgtccatggataagtcggtcatgaaggtccaggcccagcctctggaaccgccgccgatataagcaatatttaaatcacggactttgttgttttcatatttcatggttaaatcctccttctgtgcatttcctgctttgttattcgttattgctaattatacagcagtatagtattataaatcttatagaatcgatgctttttatggtattttcgtacttttggctacaattgaaacacgacaggacgtaaaacgacgggagatgtggagcagggaatggaacgaacggtattttcagaaaagatggcagggcttaccatcgacgaggtaatccgtgattacgaatttacgatgcagaccaaacattttcatgacagctttgaactttattttttgctggagggtgaacggtactactttatcgaccgggagacgtaccacgtaaaaaaagggatggtggttctggttaaccggcagcagattcataagaccagtctggctggaaaatcatatcatgacaggattcttctgcagatcagccaggaaggcttcagcccgttgctggagcaggccggggtggttccgctgaccaggatgtttgaggaaaattatggcataacggagcttccggaaaagatatgggagcaggtgaaacgccttctgtttgaaattcgggatgagctaaaggagaaacaggggaagtatgacgggatggtgaagttaaagctggcggaaattcttctgcttatttaccggtgccgcaggaatcgggtatatcataagcggggaggagaactatcgacggtacagacgcccagacaccagaaggttcatgaggtggcggattacctgcttcaccattacgatacggacgagtcattggaggagctggcggaacgcttttttatcagtaagtcgtatttgagccggatattccgggaggtgaccggtttctcagtcaatgaataccggaatattacacggatcaggaaggcgaaggagctgcttgcaggcagtgaatattcagtgacggagatatcggaactgctgggatttgagagcgtgacatattttgaacgggtatttaagaaactgacggataagactcctcttcgatatagaaggatatgcagtggagatcaggaggagcagaagatactgtgactggttttacagatagaaaaagcagcggttagatgaatctgaaccgctgctttacgaaattacttaactgcgggtaacaggacttgaacctgcacggtctcccaccagaacctaaatctggcgcgtctgccaattccgccatacccgctgacaccaatggatgataccatctgagggcggaaatgtcaagaatttatgattaagctttgtgaatcccgtttcggatgatcgggtagagttccattgccagcagtgagaatactacgatatatgccaaatacgtcatatgtaacacctctctttctttgataccattattatatacacgaggaggtaaaagggcaattcacattgtatctaaaaattttttagactcctgtggttttaaatacagaatatacaaaaacttttaggttacctaaatcttttttagatgagaagtattggtttccattcaaataacaaaaaagccgtactcgacggcttttttgttattccatatattcctgagacaccggggactcgaaccccggacaacttgattaaaagtcaagtgctctaccacctgagctagtatcccaaagctgggccagccagattcgaactggcgactgcaggagtcaaagtcctgtgccttaccgcttggcgatggcccatcgcctttcataattcctgataaaaaaaaattcccttaaagggaaaggtgagtagagggattcgaaccctcggcctccagagccacaatctggcgcgataaccaacttcgccatacccaccataaaacgttcacatctctggttagttgatgtgaaacgagcctgaagggattcgaacccccgacccacggcttagaaggccgttgctctatccaactgagctacagactcacaagcgggtgatgggaatcgaacccacgtatctagcttggaaggctagtgttctaccattgaactacacccgcaaatcaacttgagagacagcagtcaaaataacaaatgttatctttttactatcatcggggtgacaggattcgaacctgcgacctcctggtcccaaaccaggcgctctagccaagctgagccacaccccgtaaacagaatttctctgtaatttttatccaccgtctcgcgacgcaagagttattatatacgatactgcaaaacttgtcaaccgttatttgaaaaaaataaaaaatatcataacagtaacagtccgggcagaaaataaaaaaccccataaatgggaggggccggcagtaacaatcgagttactgccggccgagtatgaaaaataaaaagtcaatgttaaaagggtggggttcctttacactatttagtataggagaaaattgtgtcataaatttgtccgcaccataaacatttcataaaaaaacttaaagaaatatgagaaaatattgaaaaatggaagaagaaatataaaatccggtgtaaagccgccaaatgggttcccaaatggcctgtttatggtatactggctgttagaagcaggaagtatggccggatacgggacggacttcctatattaagaaaattgcaggagacagagcgggaggagagtaacgtgcagctgccattggtaagtataatagttccgattcacaattcggaaaagacactgaaccggtgtattgacagtatattaaatcaggattatcaggaactggaggtatttctggtagatgacggaagcggggatggaagccttgcgatctgccgcgattatgcgaagcgggacgccagggttaaggtaatccggaaggagcagtccggggtgtcagatgcccgcaatctggccatggaccaggcagagggaaagtacctgcaatttgtggacagcgacgactggatcacaacggatgctacaagaatgatggtatcggcggccgagtatggctcctgcgatatggttatcactcactttttccgtgtcaaccacgataaaatcagaagaaaaggccatattaaggaatacgaaattatgaccaggaaaggctttgcagagcacatgatggaaaaaccggccaatttttactatggagtcatgtggaataaactgtaccggcgggatattctgaacgcatataagcttcggtgcagccgggaattgaactggtgcgaggattttctgttcaatcttcagtatctctgctatgcggaacgcatctgtgcgctgccgtatccgacctattattatgtgaagacaaaaaacagcctggtggcgaaggaagccacgatgaagaataccatacagacgaaaaaattcatttttacttattataaagaactttatgaaaatattgacctctatgaggagaataaggggaagatcaatcgcttcctggtctccatcgcctctgacgggcactgagaggtcccgtttcaggctttgatatggttgaatggcggccggtaatctgtggaaaataatgagaacatgataaacagaacataaagtttattaagaattatttgtgtttctttcggttcctttaatacgctatacaaaagaatttaaacgtgttataatcctcttcgtcgcaacaagttaagacagaacatgaggagagattattatgagaaagaacagcaggatcataacgctggcagtggctgcagccgttatgatggcagtaactgcgtgcggatcaaaagataagactgagactactgcttccacagaggcaacgacagaggcagtaaccacaacagcggcagcggagacgtcactgtcagaagctgaaagtacagaggcagaagatcagacagaagaggaagagacagatgaggctgaggaagccgcagaagagacgacagcgtctgcatcgggagagatcggttccgacggcgtgtttcaggcagccaacgggaagttcgagatcaaggttccggctggctggaccattgatgagggaagtgatgatgaatatgtgaccttcctttccgcaaatggggaagacatgctggaaattatgaccatcagcggcagttccgcagactctgtccgggaaatttatccggataccgccgaagagtacaagaatatggtgagccgcggcgacgggatggaaatcctgtcctacgatgtgaacacaaaagaggatggaagccagaccttccagtattccatgaagtatacgaatcccagcgacggaattcattaccttgcagaatcaggtacttatgatgcggcaaagcagacctactcctgtgcaacaggaactgtgatgtcaacagatgaggctgtggccaaacagattgaagaggctgtaaaatcatttaagattaaataatccggcgtcaccggattgaataaaagaaaagggatatgacccggactgaggggtcatatcccttttctttctgccgtaaggcgtatcagactgccgcccagaagaggaacgtcctcctcctgatgggtactgataatcgccagctttccgttggttttctgctttacaaacgcgatgacctttctgcgcgtgtcctcatccagaccggtaaacggttcatccataaggacggcatcaaagggtactgccagcgcccggcagacggcaacgcggcgtttcatgccgccgcttaaggtggagacaggcctgtagatggactcctctggaagaagtttacataaatcttcctttgcggcttcccgtatttcccgtgtaacctttggaaagaccatcagcacgttatccagtgaagaaaaggattcgcacaggcggttctcctgaaagaccgccgagagaaaggccccttctgttcctgctacggttccgctgtcgggcttgtcaaggccaaggagaattcggaagaacgtggtctttccagaaccggaagcgcccatgaggcagtagatgcctccggtccggaaggtctggctgacctggcggaagacttcccgcccttcaaatgattttgagagatttgtaactgtaatttccatggtttccgcttaagcaccccgctttccgtttgctctgttctgccgttttgcagccttgagaagctggatgaagaccttctcaaacagaccgctgatgacaatgattaccagtgtccaggcaaataaatccgctgtgcttaaatagatttttgccatatacagcttctcgccgatggaatgatccggcacaccgatgacctcggcggcaataccggatttaaaactcataccgagactgatagcggcgccgtttataagatagggaagaagagccggccagtaaatataacggaacttcttccagccggacatgtgaaagaccccggccatctccagcagctgggcatctgcgctgttaagtcccgagatggtattgacgtagatcatggggaataccaccagaaaagcgataaagaccgacagatttttagagccgatccagatcagtgccagtatgacgaaggaagctacgggtaccgatttgaccagaaccatgacaggttccagtaaatcctttaaaaaaggaaaacggcaggcggcacttcccaccagaatcccggcaaggaacgcgcctgagaaaccggaacagattttaccgaaggtaaggccgatcgtacgccagaattccacggtggaaatctgggaaaccagtgctcccgcgacctccgcggggccgaccaggacgatggaattgtgtacggcaatgctgataagctgccagagcaccagccagaaacagataatgccggctttccgccccagacctgatggtttcattgagttcccctccttgctgtttgaattgttcggcggccggagaccggccgccgggttcgaacttcgtccgtcaattcattatggtatatagaagaaatcttttgtaggaagttcgccgcctactgtggccggatccatctcatacagagcagagagatatccgtagagcctgtttttcatgtcagttccgtctatataggtgatgctgcagtacggaatggccttttcggctacaggagccttttcgatgatgcctgcggccgcgacgagctttgccgtctccgcaacgttttcattggcaaatgctgctgaagccttctgttcttccataaaagtctggattgcatcggcatgttcttcaaataattcaccgcggcagatggttacacctgttacgagactgccgccgtcttcgccggagacggcatcccattctttggtcagatcgagaaccattttgagcgtgtcattctgagccatggcaacggtgacgaacggctgaggaagaagtccgatggcatccggtttttcttttaacagagcggcgacctcggttggctctgatttatattccagagtcacatcatccgtggtcattccgtttgcctttaataaatactgcagcgcatagtccggagtggttcccttaccggttaagtagacggtttttccctttaaatcctcaatggatttgatggagtcgtccgaagacactacgtacagtactcccagggtgttgatatttaaaacattaactccatgattggtcttgttgaaaataatggaggccatgttggagggcaccagcgccacatcgagatctccgctcacgatttttccgagcagttcatctgctgcggtcaccatcgtaaactcataggaacctttggcctctccctttgctgcctgatccatcagctctaccagtcccatagaggtagggccttttaaagagccgatgcgaagcgtatagccggcagccgcagaggtgccggtgctttccgtttcagtttcactttccgtttcaggagcttctgcagtttcttctgcggatgtctccgtggaagcttcggcagccgctgcagtggtggcttccgccgccgtctcaccagcgccttttgcacagccggtaagtgccgccgccgtcatggcaagagccatgagtacaggtaatacttttctcataattatcatcctcgctttctgtccgtatcaataacccgattgcgcagccataaatcacagagagcccggcgagccggacttccgtaccggaaaataaaaaaaccacaccaaaaaggcatggggaatcccgcgatcgatgatttctcctcgccttctccgtcaggaacaccttccgggttagaacgaacaagtccagtataccattacctggcaggttttgtcaaaacatcttatggacctgtgttccggcatgaaaatttcacgctgcggttcactgatcgcttcaacctgttcatgatttccgtgaaaatttcacatacctgccggaagtttcctttttttctgttcagatatattaaaaattgtgatatactgtaatcacttatacttatattacagaaaggaaatgaaggaggacaaagacaagatgaacgaagtatatgagaaactgcaggggtgtttaaagagtgtgcgggaaaagacagattttaagccggagattgcgctggtgttagggtccggtctgggagaatacgcggaggagatagaggttgccgagaccattgactacaaagatattgaagggtttccggtgtccacagtgccgggacacaagggcaggtttattttcggttatgtaaacagcgttccggtggtgattatgcagggccgcgttcatttctatgagggatatccgatgagcgatgtggtacttcccgcacggcttatggggctcatgggagcgaagaccctgttcctgacgaatgcttccggcggtataaacagtaccttccatgccggtgactttatgctgatccgcgatcatatcgcttcctttgtgccgtcaccgctgatcgggggcaatatcgatgaactggggccgagattccctgatatgagtgatatctaccggagagaactgcgtgatatcatcaaagagacggcaaaggaagaggccattgagctaaaagagggcgtttatttacagctgacagggcccagctacgaatcaccctccgaagtttccatgtgcaaaatgctgggcgcggatgcggtcggcatgagtacggcctgcgaggctgtagcggcaaatcatatgggaatggctgtctgcggcatttcctgcatcaccaacatggcgtgcggaatcagcaaggagcctctcagccatactgaggttcaggagacggcagaccgggttgcgccgctgtttaagcgtctgatcacggcttccatcacaaagctggcaggcagataggaatatgaagcagaaaggggtaatttcatcttatggataagaaactgtcagagcggattctcgcttccgcgggaacgaagaaggcgtctctggtactgaagcatgggacggttgtcaatgtatttaccgccgcgctggaacaggcggatatcgctgtcgaagacggctatatcgtgggtgtgggggattatgaaggggtaacggaagtggatttaaagggggctgtcgtctgtccgggactgatagatggccacattcatctggagagctccatggtaaccccgggagagttcgaacggaccgttattccgcacggcactcaggctgtcattaccgatccccatgagatcgctaatgtggcgggcgtcgaagggatccggttcatgctggagaggactgccgggctgacgctggatgtcttcttcatgcttccttcgtgtgtgccggccaccggtctggatgagtcgggggctgtgctgcctgcggataagctggaaccattttataaagacgagcgtgtgctgggccttgcggagctgatgaattcctacgggaccacgagagctgatcagggaattctcgacaagttggaaggggcgctcggaaagaataagctggtagacggccatgcgcccggtcttacgggaagggaactgaatgcctacgtgacagccggggtgaaatcggatcacgagtgttccacagcatacgaggcgatcgagaagctgagccgcggccagtggatcatgattcgggagggaacggctgcgagaaacttagaggcgctgatgccgctgtttcaggagccgtattaccatcggtgcatgctggtgacagacgataagcatccgggcgatttactccgcctcggccatattgattacattatccggagagccataagccttggcgccgatccggttcacgcagtaattatgggttcctgcaacgcggctcagtatttcgggttgaaagaccggggagcaatagccccagggtatcaggcgaaccttattgtagtatcagaccttgagaatttccgcgtggagcaggtttataaaaacggcaggctggtggcggaaaacggcaccatgaaggaaggcgtcctggcggctgagagaaagaacatagagacgcctgtcagagtcggcgattcattccatttaaaagagcttacaccggagcagctttacatagagaagaagagcggacaggtgcgggttttatgccttactcccggtgaactgacgaccacggagcgtctggttccgtggacagaaaaagaggggtatgctccgggggtggatgtggaccgggatattgtcaagatggcggtatttgagcgccaccacgacacgggccatatcggtctgggcttcctgggaggctatggcttaaagcatggtgcggtagccaccagcatcgctcacgattcccacaacttaatcgttgcgggaaccaatgatgccgatatgatactggcgggaaatacggtgagaaagaaccgcggaggtctggcgatcgcagcggatggaaaagttcttggagaactggccctgccgattgccggtctgatgagcgaggaagcggctgaagtggtggatcagagattagaggcgttaaaagaagaagccggaaaattaggaatatcaaaggagattgacccgtttatgacgctggcattcgccagtcttcctgtgattccaaagctgagactgaatacatacggcctgatagatgcggagaagcaggaaatcgtagatgttatggtcggatgtatgtgaaaaagtacagattagatcgtgttttttgattgataataatatgtcaatgtgagataatgtacgcaaagggcagagccaggcagacagccatgaagccggcgcggaatatgaaaagccgttattgcctttcatattccgcgccggcttcatggctgtctgtatggctctgccccttgcggacattcaaactaagtatttcaccaccaccacaaccaaacacaagatattggagggagattcacatgagagttacaatctgtataggaagcgcatgccatttaaaaggttccagagaaatcatcgcccagcttcagcagttagtaaaagaaaaccatttggaaagcaaagtagacttaaatggttccttctgcagcggcaactgcgtcaacggagtctgcgtgaccgtagacggccagctgttctctttaaaaccagaagacacaaaggagtttttcgataaagaaatcaaagggaggctgtaatcatggcgattattgatttcaaggctacgaagtgcaagcactgttacaaatgtgtccgcaactgtgaagtcaaggcgatcatgataaaagatgagcgggccgagatcatgccggacaaatgcattttatgcgggaaatgcatgcaggtctgtccacagtcagcgaaaacccttgtaagtgacttagacatcgtaaaaggctacatagcgaacaacatcccaaccgtcgtatccattgccccatcctacatgggactgctgaaatacaagagtatcggccagatcaacgcagctctgcgcaaactcggcttcaccgatgtgcgggagacctcggaaggcgcggccatggtgaccgccgaatacgcacggcttctggaagagggaaagatggaaacgatcatcaccacctgctgtcccagtgtcaatgatttaattgaaatctattatccgcagctgattccctacatggctcctgtggtctcgccgatgatcgcccacggcaagatgctgaaggaagagctgggaaagaatgtaaaggttgtattcctgggcccgtgtatcgccaagaagaaggaagcgggcgatgtccgccacgactcctgtatcgacgcggtcttaaatttcaacgatattaaccgctggctgaaggaagaagagattaccattgaggactgcgaggatatcccgttccgtcatctggacccacgggtcaaccgcctctatcctgtcaccaacggggttgtaaattccgttcttgcgacagaagaaaagagggacggctatcggaaattctatgttcacggcgccaggaactgcatcgatttatgcgaaagcatggtacgcggagaaatcaaaggctgtttcatcgagatgaacatgtgctccggaggctgtatcaaagggccgactgtagaggatgagagtatatccagattcaaagtgaaactggatatggaagagacgatagaaaaagatccggccgaaaagagtgaggttgaggaaatcatcagcaggatatccttccagaagctcttcatggaccgctcaccgagggaagcgatgccgacggaggctcagatccaggatatcttaaagaagacgggaaagacaaaaccggaggatgagttaaactgcggagcctgcggttattccacctgccgcgagaaggccatcgcggtatttcagaaaaaagccgaactgggcatgtgtatcccctttatgcatgaaaaagcggagtccttatcgaacctggttatggagacgtcgccgaatatcgttttgattgtggataaagacatgaaagttttagagtattctgcagttggagaaaagtatttcgggaagacgaggcaggaagccttaacgatgtatttatatgaatttatcgatccgtcggatttccagtgggtctacgattcccatcagaacatccatggaaaaaaggtgacttacagcgaatataacttctccatgctccagaatatcgtttatattgagaaggaagacgtcgtgctcgccacgtttatcgatatcacgaaggaagaggaactggcgaaacaggagtatgaaaagaaactggaaaccatcgatctggcacagcgggtaatccataagcagatgatggttgctcaggaaatcgccggtctgctgggcgaaaccacagcggagacaaaaaccacgcttacaaagctttgccggtccctactggatgaaggaagtgaaagcgaggtcaagtgatgggagtaacagtagacgttgcatacaaaagcctgaataagttcaatgaggtcctgtgcggcgataaggtggaactgctccagacggaggattccaacatcatgattctcgccgacggcatgggaagcggtgtcaaggccaatattctggcgactctgacctcgaagatattgggaaccatgtttttaaacggcgcaactctggaagagtgcgtggagacgattgtagagacgcttcctgtctgccaggtgcggcaggtagcttattccaccttcagtatcctgcaggtattccataacggagacgcctatctggtggaatttgataatcccagctgtatctttatccgggccggacagctggtgccgattccccagaatatccgtgtgattcaaaacaaaaagatcaacgagtaccgtttccgggtgaaaaagggagacgcactgattttaatgagtgacggcacgatccacgcaggagtaggtcagctcttaaacttcggctggctgtgggaagatattgccgcctatgcgctgaaacagtaccgggtcaccatctccgcgatccgtctggctacagcactcagccgggcctgcgacgaactgtaccagttccggccgggagatgacacgacggtggctgtcatgcggatcatcgacagaaagccggtgcacttaatgaccggacccgccaggaacccggaggatgacaccgccatggtaactgatttcatgtcgggtgatgaatttaccaagcggatcgtctgtggtggtaccagcgccaatatcgtggccagaaccacgaagaaaagcctggatgtttctctcgattacaacgatccggatattccgccgatcgcttacatcgatggcatagaactggtcacggaaggtgttctcaccttaaaccgcgttctccagctgctgaggcgctatgtgaagaacgaggcagtcacagaagagtttttcctggaactggataagccaaacggggcctccatggtggccaagatgctgattgaggactgcacggagctcaatctgtacgtgggaaaagctatcaacagcgcgtatcagaacccgggtcttccctttgacctcggtatccgtcagaacctggtggaacagctgaagcatacggtggaagagatgggaaaaaaagttacggtaacctattattaatgaaatttgcgatagagatccattctgcttccggcagatggtagttacgaggaggataattatggtaacaaacgatgcaacattacttcgccttaaacatcaggtattgtatgaggtggcgaaaatggcgtgggagggagatttagaacagcacagaagtgaaattccctataagatcattcctggccccaaagcgcagttccgctgctgtatctacagggagcgtgagatcatccgggagcgtgtccgtcttgcggaaggattatgtccgagtggaaaagatacgaagaacattgtgcaggttatcagctccgcatgtgagggctgccccatcgcccgctacgtcgtaaccgacaactgccagaagtgtatgggaaaggcatgccagaattcctgtaatttcggtgctatttccatgggacatgaccgtgcctatatcgatcccgataaatgcaaggagtgcggcaaatgttctcaggcctgtccgtataacgcgattgcagatctgacccgcccatgtaagaagagctgtccggtagacgccatcaccatggatgaggacggcatcgttgtgatcgatgagagcaaatgcatccagtgcggcgcctgtatccacagctgtccgtttggagccatcggttccaagacattcctggtggacgtcattaacctgatcagggcaggcaagaaggtagtcgccatggtggcgccggcaacagaaggccagtacggtccggatattacgatggccagctggagaaccgccctgaaaaagattggctttgcagacatggtggaggtcgccttaggcggtgacttaactgcggcggcggaagcggccgagtgggcggaggcctataaagaggggaagaagatgacgacttcctgctgtcctgctttcgtcaacatgatcaaacagcattatccgatgcttctggatcatatgtcaacaacggtatcaccgatgtgtgctgtgtccagaatgttaaaggcgcaggatccggagaccattaccgtcttcatcgggccgtgtatcgcaaagaagagcgagactctggatttaaatatcaaggataacgcggattatgccatgacgctgggcgaggcccacgccatgatggttgcaaagggcgtggatttagagccggaagagaatacgcttcagcagggctctgtattcggaaaacgttttggcaacggcggcggcgtgacggcggcagtgttagaatgtctgaaggaaacaggcgaaaatgccgaaatcaatgttatgaagtgcaatggagctgcggagtgcaaaaaggcgctgatgcttcttaagattggcaagcttcctgatgatttcgtggaaggcatggtctgtgtcggcggatgcgtcggcggcccgagcaagcataagagcgagctggaggccaagaaggcgagagatctgctgatcggccaggcggataagagagcggttcatgagaacttgaagatgcagggggcggaagaagtggcgatgcaccggcattaagggaaaaatagaagtttaagggccccggtcgaggatttcggttctttctcggctttgggtgtgtggccgtgccggagggcttgatatcccgtgtccgcctggcttcctactcgccacaaaaatgaacgtgactgtcggacacaaagcccatgtgttcgtcagtcacgttcatttttgcggttcgtatccagatggcggcacactgggatatcaagccctccggcacggccacacacccaaagccgagaaagaaccaggatttcgacaggggctttttgctgcttgtatccctgcaaaagacatggatctgtgaaccgtagtactctctgcaatgcacaaaaacggaaagcacctcacgggatactggccgtgaataaaaatgctttttaacagatgatgtatgcagagcatactggcttgtaatcaaaagagaaggatgataaaatggtgttgtacctggagagtcgctttacaacagtaaggaggctggtacaaatgacgaaagaagatgcaaagacactggttttataccagacagaagacggagcagtcactttagaggtaagtgtggaagatgatacggtgtggctgactcagatgcagatggcggaactgtttcaaagagatatttccgttatttccaggcatattaagaatgtctttcaggaagaagtggaggaaaaaagcaatttgcattttttgcaatttgcacattctgataaaccgattacctgttatagcctggatgtgattatgtctgtaggatatcgtattaaatcaaaacgtggtatagcatttcggaaatgggccaaccaggtcctgaaggactacataatccatggatatgcagtgaatcagagtcgtatggaacagttgggaggcataatcagagttatggagcgtgtaaatgagtgtttggatacgaaacaggttctccatgtaatagagagatatgcctcggctcttaaccttctggatgattatgaccatcagaggatagaaaagccagggggcagtaaacctgtctgtatattgacatatgaagagtgcagaaaggtgattgctacaatgaatttctcagaggagagcagcctgtttggaaatgaaaaggatgagtcatttaagtccagcataggcgctatctaccagacgtttggaggaagcgatgtttatgaaagtatggaagaaaaagctgcgaatcttctatattttatcaccaaaaatcacagttttagtgatggaaataaaagaatagcggcagccatttttctatactttctggatcaaaatggaattttgtttgatgatggaaaaaagcgtattgatgactttgcattggcggccattacgataatgattgcagagtccaggccagaagaaaaggaactcatggtaaatctggtaatgaagtgtctgatctgatgaaaatggagacggtcattatctgtatagtgctatttacggagtccaactaatttttatgcagctcatgcaattaatgggcggcagatgtcctggcagaccgtcttcctgccaggacataaagttatctcacaattacatagatgagatacaccagatacatggccagcataaaaccgccttccatgcggctgatccggttcttgctgcggcagaggagccaggtgatgccgctggcgatgattaagaatgccgtgtcatagatggaaaatggattgacaagaagcggatgaatcgccgcagaagctcccaggaccagcaaaatgttaaaaatgttggagccgattacattaccaagagccagcccgttctcaccttttcgggaagcgaccacggaggtgacgagttcggggagggaggttcccagggccacgatggtcagaccgattaagttctggctcaagccgaaggaggctgctatggcgctggcattatccacaaccagatcaccgccccagacgatggcagccagtccgcctatgatgtagacagcacaccgtacgggagaaagcgttttgatctcctcactggtaacgatccggttgacgatggcgtcacgaactgtaaaaccaacaaaagcaaggaagaagaccagaagaattatcccgtccatccggttcaatgtctgatcgaaaaggatcatgacaaacagggcggcggcgacaaacacggaagccgcataatcccagcgcagtttgactgaaaacggacgaatgacgccgcaggcacccagaacgaccagcaggttaaagaggttagagccgatcacatttcccactgcgatatcattatttccggtaatagaggcggaaacgctgactgataattccggtgcgctggtaccaaaggctacgattgtgagcccgataatgatactggggatgcgcagcgccctggcgatcgaagaactggcctccacaaagtaatcggcccccttgatcagcaggaagaaacctaagagcagaagtacgtacatcataaatataatccttctttcgtgtgttttaaaaaggaagaagggcaaaaaaagcgagacttttattgcacgatggagatgatcatgcaataaaagtctcgctttttatatgtgcaccggtttccgtcagccggctctgccgggcagatgcctgtaagcttgcggaaacgggaatgtcggctgcacagaacgcggtaaatgtaatgaaccgcgcaagctactcccttttactgagtattagtatatccggtgagcgaaaaaaagtcaagcttaatgcagaagcttctgcagttcctccgatattctcccaagcacggcgatgacctctgacgtgttttcattccggttttcggaaaatgcatagtaggccccatagatctgatagctcaggatgatatttttgaccggatcatcccggtattccggcagacgttcatagatcagttctttgatgcctgcttctatcttctgaatcagacggccgctccggctgcctgaaaacagtgtctggatcagggtatccctggaaagataggcaaggaacagctcctgtgtaaaggcgccgggatgttccaccatatactcgggatgatccaaagagctgatgatggaggtcacgatctccgtctcgaggaaatcggacagttcatagatgtctgcatagtgaaaataaaaggtcgatttgttgatcatggccttttcacagagttcctttaccgtgatcttttccagaggttttccggagcgcagagcgatgaatgcgttaataatactctgcctcgtcttttctattcgcaggtccatggggcactcctttccaacgattttgcaaaaacgttggttatccaaccgttttacgaaatcggtgatggataacagataaagatttttatataatcaattatagtaggaaaacagacggttgtctattatctttgaagaaaaagaccgggaagccgtctgccgcatttacaggaggtatcagtatggattattatgggttttatacggggaaagagttttcagcttatgagtatctgggggcgcatcgtttggaaaatgggacggtgttccgcacctttgcgccgaacgcagtacggatttccgtaatcggagagtttaatgactggggggagacgcccatggacaaagtgtacgacggaaacttctgggagtgcacggtgcccggggccaaagccggaatgatgtacaaatacaggatctacagacgtgacggctcttttatcgaccactgcgatccctatggctttttcatggaactgcgcccgcactcagcctcagtcatcagcagcttaagcggatatgagttccgtgattccaaatggcagaagaagcacagagcagggctggacaagccgctcaatatttacgaaatacatgccggctcctggcggagaaaagagcgggtggacggcgtggaaaagaacgcggaaaagcattcggaaaaatattcgaaaaaatatttggaaaaagacggggaaaatggtgtgggaagggggctggtaaatggctggtattcctatactgagctggcggatttactgatcccgtatctggaggaaaacggctataattatgtggaactgatgccgctgtcggagcacccatccgacgagtcgtggggctaccagaataccggttttttcagtccaacctcccggtacggaaccccggatgagttaaaagcgtttgtcgatcagtgccactctcatgagatcggggtgattatggattttgtgccggtacattttgccgtggatgattatgcgctctggaactatgacgggacggcgctttacgagtatcctcacagcgatgtgggaaggagcgagtggggaagctgcaatttcatgcattcccgcggggaggtcagaagcttccttcagtctgcgggaaattactggctgaaggaattccactttgacggactgcgcatggacgctgttagcaatttaatctactggcagggagatactgcaagaggggaaaacagaaatgggattcagtttcttcaggagatgaacaaagggcttaaaagtctgcatccggagacgcttctgattgccgaggactcctccgtctatccgggcgtcacaaagccggtggaacacggcggtctcggcttcgattataagtgggacatgggctggatgaacgatactctgtcatactttcaggcacctccgtcggagaggaaagagaggtatcatcagctcacattctccatgcagtatttttatcaggaacggtacctgcttccgttgtcccatgacgaggtagtccatggaaaagcgaccatcctgcagaaaatgtacggggcgtatgagggaaagttcccgcaggcccgcgcgctttatctctatatgtacgcccatcccggaaaaaaactgaactttatgggaaatgagtttggccagctccgcgagtgggatgaaaagaggcagcaggactgggagatcttacgctatccggtccacgatgcgtttcaccgcttcatggaggatttaaaccgcttgtatttaaacagtccggctctgtatgagcgggattatgaaccggacggctttcaatggctggactgtcatcaggaggagcggctgatctatgcgtttgaacgccggagtgaaaaacagaggattgcagccgtttttaatttttcggatgaggaacaggaggggtatgaactgagggtggaagacgcagaatgtttgacactgcttctgtcgagcgagacaatgcgatacggaggcggggaatcagagggagaagtccttccggttgtgaatggagcggcggtgctggcgctgccgccatactccggacggtattatctggtcgattctgattgaaaaagcggcgaaagaacagaagaaacagtataaaactcccccgccgggcaccgcatgttacggtacacggcgggggagcttatgctgttactttttacgaaatggattcgtttgtgatatgaagcgccttcttcatcgcttccagctcctcatccacccgggacttcgactggtcgccgtacagggcgtccagttccgccgccgtgcttttgcggccggtcagctcttccttggcttccgcttcgtgcagcatgcggttcgccttttcttccatacggtcaaactggctcatcaggccggcagcagtatttacggacttcatctgaacttcacctgcctggttctttactttggccgtacgaaccgtgtttttcatggcttcggcccgcgccttcgtcttttccagtccggcagtcagcttgcggtagtcttcttctgccttatcggcctgaaccttgacagtcacgtagctgtgctccagagtcggtcttaagtcttcctgctcctgcttcagggtaattgcctgccgggccttttcttcattgccgtcacgcagggcgcgttcggcatacgtaccaaactttttgatctcggcgtcgcaggcgtccagcttcgccttcgcttccctggaggaggccatgacggaggctgtgcttcccaagagatccttgatggcatcctcgtatttccttaccatctgatccgccatcttttccgggtcctcggctttgcttaacagttcatcaatgtttgcagatacaatatctttgattcttccaaacacatctaatcccatatatgctcgctccttttccttgccgtcagtcagggcctgaggctctaattccgcttatccagaaccgcttccacaatctcggcgttggaaacttcctgttccatactgttctggccgcttccctgtccggcaccgttgatgttgacattcgttgtggtctttcctaatacatccgcgtcgatgatctccttgaaatcaatgccggtcgtctctttgactgtctcaagcgtcttggcaaggacggaacctacattgccggccaggtttcccacaccattttctccattgccgctgccgctgtcgataaccgtgatcttctcgattctggcgagcggttcggctattctgcctgccatctccggaagaatgttgacgatcatctctgttacggctgccttgttgtacttgttgtaggcctctgccttcttttccataccttcggcttccgctaacagggcggccttgataccttcggcctctgccagcttcttcgcccggataccttcggcctccgccagctgctttgcccggataccttcggcctctgccagctgtttggccttcgtagcggtggcttccgcctccgctttcatacggatcgcagcggcttccgcctccgctttcttcgtctcagcgatggcattcgtttcggctgtggcaagacctctcattctggtggcctctgcttccgcgtcagcctgtttcttaagagtctgggcggaggcgtctgcttccgctactttcttatacttctcggaatcggcgatctgagcctgcttttctctctcggcgatggcgggctgtacgacggttgcctgtaaggaggcctttgccgtctcggcctggcgctctgccagctcgcggttcttgacttccttggaaatctctacctgcacggcagcctgttcgatatccttctgacgttcctgacgcagaagctcggcatccatctccgtctgaataacgtccttctcggtgatgttcttctggattgcgtaagctacgtcagcctgggccttggaggtctgaatctccttctggtaggcctgttccttgattaatttctccttgttggccgcgctgatctctgcctctgtggccagcttcgcctgctcaccatccctgcgggcttcgctcaccttgatctggcgctcgcgctctgcctctgcctgggcgatgtcggcttccttcttcttctcggcgatctgcttgacaccgagggacttgatatagccgttttcatcagtcacatccttgatcgtgaaggacatgatctcgagacccatggtggaaagctcggtggccgccgcttcctgaacggagttggcgaacttctcacggttgctgtacagctcttctacggaaagggtggatactacctcacgcagcttgccttccaaaatctgtcttgcaatctcttccatgttgagcttgacttccttgatgtccttgccgttgaagcgctcgattgcctttaagatgctggtggtgtcgttcttgacctttaagacgacggtgctgaccacgttgatcggtactttctgggaggacatactgtcttctgtcgtgatctctaagctggaggcgctaagcgatatgtaatcgatacggttgatgacaggtatgacgataccgcccccaccggtaattacctttttcttaatgccggttacgacgccagctttatcctgcggaacgcgtttccaccaggacatgatcaccattaaaaccagaatgaccgcggctacaataatgatgattggtattagcttgttgatcagttcgctcattttcgttctccttttctcgcctttgtttttaagtttatgtataaagaccggcacaaatcattcggcccctattcatcctccgcactgccgtaaccggcaaattcgtccttgggccgtaccacggctatctcgccgtcaaactcgaccagcttcaccacggtgttctgctttaagacctccgatgcatcggtactccggcatacgaaggtggtggcgattcccttgatgttgtcgaattccacggttcccaggccgcctgccaggacggtattaatgatccttccgtcacacagatatagctcttcccggttcattgcctcattctccacccgcttcagcctccttatgaccatctgaaccgccatcgcggccgcgtagccgacgactaaggcgaaaatcagatgattgaataaaagtcccataccgccgaatgcgatgagcccggtacagatgctcacccctgaaatcggcagaaaattcagatcaatatcaaaatcgaagtttagaaatgcttccagcgctccggatacattctccaggaattcacccagaacagacagcgaaagcagtaaaaaaccgatgaccatacaaatgatgtaaatgtccctcatggcgtccccctttgcagctgatttgaggctttaagcctctgccagccagcttctgtaacgatttctattataccattttccggtaaaacatactatctatcaattcatacaattttcttaaattagttgaacaaaaatggtaatcaatgcttgtagaaagaatttacaaacgatttttgtttcttacggtatcaggtgagcggttcaggtgacaaaagaaattattaataattctaagtaatactttattgatatgacaatcaagtatataataaaaccaggaagagaacatggcatacggaggagagagcggaatgggaaacggatggaaagtaaagagttatatagagaagataaaagaagcccatttcaagaaccaggaagaagaacggcggctgtgtgaggagctgattacatattcccaggcgaatcataacgcctacggcttaggctttgcatacacgtatctgctggattaccatatcgccatgcacgatacggagggatgttcgccggttcttaagacggcgctggaatttcataacggccatgagtttctggatctgcggatgcaggtgtttaactttgcagggatttactacagctatatccatgacgatattacggcgttcgattatttcctgaaaagcctggaattggcggaggcgctgaacgacagctttatgaagtaccgcctttataataacattgccgtcagttttcacaacaaaaaggattgcgaatcggcgctggcctattaccagcaggcgtatgactatctgaacttcagtcatttagaggggctctatacccagtatcagctgtatctgcttcagaacctgatcaactgcagcattgccctggattcgaaggaactggtgctggaatactgcggcaggctggagcagctctatgaggagcagccccgtttgaaggaagacttatccgtgccgtggcagaatgtcgtgatcctttcatactttggaaaacgggaagaggcgtatgagattctgcgcagccatttgtgctgggaagaggatccgctgggcgccacggatattattgaactgtatccccatatacttgatattttgctggagtggaaggagaaggcgcttgcggagaaggtactggagtcactctgccgccatttagaacgggaatcccccagggcaagacaggaggcctgctcccatgagattcgcttttatgagatatttgggatgacggaacggcttccggacgcctatgagcggtattatcaggcatcgaaagaggcgctcggttcggttgcccacaaccagatcagggcgatgaaggagaagctgtattccttcgaggttcagcagaagctgaaccggcttcagaaactgagttatatggatgggctgtgtgatatttataaccggaggtactatacggaacagctggaacgcgccatgaaagaaacgtctgtgaagcggctggggatcatcattctggatatcgattattttaaagagtataatgactattatggtcataacagcggggatctggttttgaagaaggtggctctctgcctaaaggaggaggcggcagatcagatcacgccctgccggtatgggggagatgaattctgctgtatctgcgaggatctgggaggagaggatatcggccgttatttaagaaatgtccatgaacggctgaaccggctcggcattgaacatgcgatgtcgcgggcggcctccgtcgtgaccctgtcggcgggatacagtgtaaggccgcttgaggggctgaatcagcaggaactgtttcatgaagcggatgaggccctgtactgggcgaagacgaggggaaagaacagagactgctgttatcagaccgatcagaccgatccggatcagtgcagccggccataaaaaaagcattgtcgcagggagctggagcctgcggcaatgcttttgtttttctaagaaactattcctgttacacagagtcctgtttacattccggagaactgattcttaacctttgtgatcttctcctgcggagcctgttccgtcgtataccagccctttgcggacattttcctgtaaatatcatcctgtatacaaagactgtcgtttaacgcgctgtcaaatgactggtgcacattggcagtcgatgattcgatggtgctgtgcagatataagtcacatactcccttggtagtaaggagaatgttttccataatacacttgtcgtccatgtgtttgcctccttacactaaatgatagaaattatcaaaaatctgctgatgtttctgggaaatctgttctgcgaaagactttaactcggggtcctgcaaattagtgactgcttcctgacactgggtctttaaaaacttctcatggcttaatgcatcttcaatatacgttaattcctttggactcatatgatcacctccacatgtagtatgtgaggtttccgtcaatccattccggcaattgattcctttttcgaagctggaactattttccagtaaaaaatcatggtgagtacggttgcggcggtccagccaaagggccaggccatccagattccggtgcttccgaaccgcggagtaagcagatacgcgaaaaggatacgcagaatcagatccggtatggttgcaaggacgaaatacaccatggcgccggaaccgcggagaatgccgtcggtcatcagcttgacggatatcatgaaatagagcggcgatacaatttttaggaacatcacgccggcgtgaatcgcttcctcactgccggaatccaggaatagtcccatgatctgccggctgaatacaaagtaaaggacgacaaacggaacggaggcagtcagagacagccggactccctcctgaaaccccggccgtatccgttcgctcctgcctgcgcccagattctgcgcggtatagctggataaacagcttccaagcgacataaaggaggtaatggcaaaggtgtttaacttaattgcggcggagtaaccggcaatcacggcagagccatagcggttcacgatgatctgcacgaataggttgccgacggagagcacgctctgctgaagaatgctggggactgcgatggcagcaatctgcttaaacagaccccagtcaaacatggccgctttttcggcccctgccatgttctttagacgcttccacagtgttgctgcagcgagaaggcaggagacaccctgagccagaaatgtggcccaggctgcgccggtcacgcccagatgaagaccggccacgaaccagatatctaacaggatatttcctatggaggaaccgatcagaaaatagagcggtgttttcgagtccccgaatgcggtgaaaattccggtacagacattatagagaatcagaaacagcaggcccagggtatatatgcgcaggtacagtgcgccggcagaaaagacgtcatccggtgttctgatccatctcatcatgggcctacagaaaatgatgccgaagacagtcaggagaatgctcaggaccacacaggagataaacgctgtgtgtatggccgtcttcatccggcggaagtccctggccccaaagagacgggatacgactaccgacgcgcccagattgcttccggtggcaaaggccatgaagataaccgtgatcggataggaggcgccgacggcggccagcgcgttttcaccggcgaaccgtccggcgatcatactgtccgcgatgttgtaaaactgctgaaacatgacgcttaccagcatcggcagcaggaaacgccacagggtttttcggggatgtcccacggttaaatcggttgtcataaggtgtcctccggttcatgtagtataaagaagagtatagcaggaggatgaatggaaggcaatcgggaaaatatatgtatttggaacagaatgggaaattttggtgatcctttctattgttaaaaaattactgatcttttacaatagtagaatacaggatctaataaaaataccatggagtatcagaatggaggcagccatatgagacgagtgatcaacgccccgtccacctacatacaggggccgggagagggaaagaagctggcggagcattacagaagcattggtgaaggcggagtcctgctgattacggaccggtttgtccatgaggtatatctgggcgaaatgacggagagctttgacaaagctgaaattacctggaaggaggaagtctttaccggtgaatgctgtgagaaggagatcaggagactggccgtggtggccggggactgcggggccgtatttggaattgggggcggtaaggtgcaggacacggcaaaggcggctggccattactcaggaaagcctgtaatccttgtgccgacagcggtatccacagacgcaccgtgcagcagaatcgccgtattgtaccgggaggacggtaccttcgaccgttacctgtcactaaagaagaatccggatctgatcatcctggacacggaaattatcgcacatgctccggtacgtctgtttacagcggggatgggagatgccatttccacgtattatgaggcctccgcatgccggcgaagcggcgcggtgacgaaggccggcggctgtgtgtccatcgctgcggaggcactggcgaaggcatgtctcaataccgttcttacctacggcgaacaggccagaagggatgtggagaagcagcgctgtacagaagctgtggaacatcttgtggaggcaaacacgtatttaagcgggatcggctttgagagcggaggactggcctgcgcgcacgcgctgcacaatggtctggcgcttcttccggagctgtctaccgtgatgcatggagaaaaagtggcgttctgtacactggtgcagatggtgctggagggcagaccggaggaggagatcagcaggattcgcagcttctgccggaatgtagggcttccggtttccctgcaggacatgaatgccggtgaaattccggatcaccggctgttggaggccgcagttaaaagctgttcaccggaagagacgatgagtcatatcggaagggatgtggagccggaggaagtggtgagagcgatgaaaaacctttgagaataatccggacagcgaaagaggtcttccgcaggcagacaggcgggagacctctttcgtttcggtgcagtctgcaccagaaggtgcaggtatttctattattttttcccgttccagcaataggtacagagcttgcagggagagatgccgatagaggcctgtaaatcatccagcctgtggtaacggagtgtagtgaagttcagtttttttctgatttcctccaccatctcctgatagtttgtgctgtcaggattggcgtagtcggccagtacttcgtcggagacgctgtccccttcccggtcgcgtatgattctgcgggtaatcagatccagttccgagttggaacgggaaaagttcaagtaggggcagccaaacattagaggcgggcaggccggccggatatggacctccttcgcaccgctctgatacaggaactccgtggtctcacccagctgtgtgccgcggacgatggaatcgtcgatcagcagcatgcttttgccgcggattaaggcatctacagggatcagcttcatttttgcaatcagattccgttctccctgattctgcggcatgaaggaacggggccatgtaggcgtatatttgataaagggtcttgcaaagggaataccggattcattggcatatccgatggcgtgagcgattccggaatccggaacgccggccaccatgtcggatttcacgtcgtccctgcgggccagaagctttccgcattcatagcgcatattttctacattgacaccctcgtaggaggaggtcggatagccgtaatagacccataagaaggaacagatcttcatctcttccctggcaggaaccaggctttccatgccttccgacgtaaaaaagacgatctcgccgggacccagttcatagtagtcggagtatcctaaattgatgtatgcaaagctttcgaaagaagcgcagaatgcgtcttcctttttgccgatgacgatgggggtgcgtcccatacggtctctggctgcgtagatcccgtcaggggtcaggatcagtatggtcatggaaccgtcgatccggtcctgagcgtactgaagtccctctgtaatgctggatttctggttaatcagggcagccaccagctccgtcgaattgatcctgccgccgctcatctccatgaaatgaatatggccgttctcataggcagaccggattaaatcgtcctgattattgattttacctactgtggtgatggcgaaactgccgagatgggactgaattaagagcggctgcggctcattgtcggatatgcagccgataccggaagtgccttccagctcatctaagtccccgtcaaattttgtacggaaaggagtgttttcgatgttatgaatggcacgggagaagccccgtggcccgtatacggccataccgccgcgtttggttcccagatgggagtggtaatccactccgaaaaatacgtcgagtgtacaactctttttagatacgacaccaaatattccgcccataaaattccctcttctatgtgattaagtcgtgtgatcgtgtaaaaaacaatccggacggtctgacaaagcggccgtccgaaacaattttaacacagatggtaagtgggaaacaatggatttacccattaaatattcttatgaggttttagaagcagggggagacgccccagggcctgcggagagtctgaggacagcaagggcgggagtgcgattggtttcttgtttcctcggtggcaggaactaaagcggaaaggcgggaaaaagaggcggatcgtgcaaattacggaagaaatcctggaggatttttcctccatgtgcacttgaaagcaggctttgaggcctgctttcaccacctctttttcccgcctttccgcttaagttcctgcgtacctcggaaaaggaaaccaatcgcactcccgcccttgctgtcctcagactctccgcaggccctggggctgtgtactggcttcgggaggggaagagcaccgatgtattcaggttgaaaaaagaccgtctctttggcttactttggttagacaaagggacggtcttgagtttaaatgctaaaaattaaatttcattgactttccgctttacgtaagtcgtgtgaagcaggtggtgcgctttttcgctgcctggttttccgagataggtctcgtagagttccttgattgcgggattctcgtgagatttacggatggtattggccgcgtcttcatcatacagtacttttgcacgcagagccctgatgtccacggtgttgcggacggaacccggctgctgaggctgtccgccgccgtttacacagccgcccgggcatcccatgatttcgatgaagtgatagtccgcttcaccggattttactctgtttaagagctcttttgcattgccgaggccggaagcgacagcaaccttgacatccataccggctacattgtagacagcttccttgattccttcggtgcctcgtacgtcggtgaagtcaactttctctaattcttctccggtcagagtctcgacagccgttcttaaggctgcttccataacgccgcctgttgctccgaagatcacggctgcaccggtaccaaggcctaacggagcgtcgaactcctcatcaggaagttcattgaaccggatgccgtatttcttgatcattctggcaagctctctcgttgtcatggagtaatccacatccgggcagccattggcgtcctgattgtctctgccgatctcgaatttcttcgcggtacacggcataacgctgacagatacgatatcttccggttttaatcccatcttttctgcatagtaggatttggcaatggcgccgaacatctgctgcggggacttacaggtggataagttgtcggtcatatccgggaaatagtgctcgcagtatttgatccatcccggtgaacaggaggtgatcatcggcagtgtaccgccgtttttcactctctcaataaattcatgggcttcttccatgatggttaagtcggcgctgaagttggtatcgaacaccttgtcaaagccgattcttcttaacgcagcggccatcttgccttctacgttggttccgatcggatagccaaattcttcacccagtccggcacgaacagcgggggctgtctgtacgatgacatgtttggaaggatctgcaattgcagcggctacttcatcgatgcaggacttctcatagagagcgcctgtcggacagacggcgatacactggccgcaggatacacagctggtgtcgcctaagcccatctcgaatgcagaaccgatgaaggtggcgaatccacgctcattggcgccgatgacgccgattccctgtaccttttcacaggtagcggagcagcggcggcagaggatacacttgctgttgtcgcggaccatatgagccgcgctctcgtcgatacaggatggagttttttcgccatcgtagtaatcactgtcttccacgcccagttccttacataaggtctgcagttcgcagtttccgctgcggacacaggataaacaggagcggttgtgattggataaaatcagctggagcgttttctttctgtaatcaaccaggtccggtgtgttggtccatacttcaaggcccggattgatcgggtaaacacaggcagcagccagcttgccgccgttaatcttaaccgtacacatacggcaggcggcaatttcattaatatcttttaaataacataaagtcggaatctcaacatgggcgagtctggctgcttccagtatggtggaaccttctggagcactgacttccatgccgttgattttaattgtaatattctccatgatacgttctccctccattatttcttgtagatagcgccaaacttacacttctccatacaagcgccgcacttgagacacttctcgccatcgataacgtgcggattcttgacggttccggtgattgcattggcaggacagttccttgcacagagcgtacagcctttacacttctcaggatcaatgtagaagttaaggagtgccttacatacgcctgcaggacaggtcttatctacaatatgggctacgtattcatcgcggaagtactgtaatgtggaaagtaccgggttcggtgctgtctgcccaagtgcacaggccgagttggcctttatgtagtagcataattcttccagcttgtctaagtcagccatggtggcctggcctttggtaatcttctctaagatctccagcatacgcttggtaccgatacggcacggagtacacttaccgcaggattcctcaaccgtgaactccaggaagaattttgcgatatcgaccatacagtcgtcttcatccataacgatcagaccgccggaacccatcatggagccgatggcaaccagattgtcgtagtcgatcggaatatcaaaatgctctgccgggatacatccgccggatggtccgccggtctgagctgctttaaacttcttgccattggggataccgccgccgatttcctcgatgatctcacgcagagtggttcccatcggaacctcaacgagtccggtattgtggatctttccgccgagagcaaataccttggttcccttagacttctcagtacccatggaagcgaaccattccggtccgtttaagatgatctgcgggatattggcccatgtctcaacgttatttaaaatggttggcttgccaaacaaccctttctgtgccgggaacggaggacggggacgcggttctccacgatttccttcgatggaaaccatgagggctgtctcctcaccgcagacgaacgcgccggcgcccagtcttaaatcgatgttgaaggagaagccggaaccgaagatgtcgtcgcctaagagttccatctctctggcctgctcgattgcgatctttaaacgctgtacggcgatcgggtattctgcacgaacgtagatgtagccctgggaagcaccgatggcgtagcctgcgatggtcatggcctccagaacggcatgaggatcaccttccagcacggaacggtccatgaatgcgcccgggtcaccctcgtcggcgttacagcagacatacttctggtccgcatcgttgcccttggccagcttccacttgagtccggtcgggaaaccggcaccgccgcggcctctcaaaccgctgtccaaaagaacctggatgacatcgtcgggggtcatctctgttaaaactttaccgagagcctgatagccgccggtaccgatgtactcttcgatgacttccgggttgatgacgccgcagttgcgcagtgcgattctgtgctgcttcttatagaaatcggtgtcgcctaaggacttgacaccggccggtgttacggtttcatcgtagaggagtctctgtacgggacgtccctttaacagatgctcttcaacgatctcagggatatcgtcttcctttaccatggcgtagaacgtggcatccgggtaaacgatcatgatcgggcctaaggcacagaggccgtggcagcctgtctgaacaacggatacttcctcatcgagtccctgcttctttaattcttctcttaatgataccataatctgctggcttccggaggaggtacatcccgttccgccgcaaactaatacatgtgaacgatacatcttgtttcctccttatttaatgtcagctgatcccagcgtgtaattttccagaatatgaccgccgatcagatgctctttgtatacttcttctgctttctcggcattcatcttgatataagttaccttttctttaccaggctcgagaatctcgacgatgggctcatactggcataaaccgatacagcctgtctgtgtaacggaaaaacggtctgtcatgttattttcctgaacgagtgtggaaagtttattaagaacaggtcttgcgccgctggcaatcccgcaggttgccataccaaccaggacacgggtacgtgcatgatcttcttcacgcatgctgacctgactctgcattttctctctgattgcttttaattcttcaagagtcttcatgttattcctccaattccggccggtctagatgaccgcgccaccatctgtttcaagtttgttttctgccagatattctttgatataggcggatacctcgggtgtatcaaaggggatatcccctaaaatctctcgaaactctctggtatccagcacaaatgacgcatcgttatagcggtatgtatagagaaaatccgtatccggatggcaggtgataagcgtttctatggtgctgttcatatcgccaaggggcatccggtcaatatgggaaagaccgaaaactgcggtgaccgtggttcccgcaccgggagttgagtcgatggtaaagcttccgccggtgctctctgcagcatacttaaaaaaggggatgccgaggcctacctttcttgtctttctggtcgtaaaaaatggatccgtcacatgagccacctgttcctctgtcatgccgcatccatcatctgcgatggtgatcgtcagtaagtcagaagcagtgtcgacggctgcggtgatcgcaacaagcgctgcacccgctctcgtggaattttccgctacatccaatacatttaaagaaatttctgtcatcatgggattttaactattcatatttggcaagaatgccggggacgtcatcgggtgtcagtctgccgtaaacttctccattgatcatcatgaccggagcaagtccacaggcgcctacgcagcggcaggaatcgagagaaaacttaccgtcgggagtacattccccgttggtaatcccgagaagttcaaccagcttatcgtagatgtcgccggagccctttacgtaacaggcggtaccaagacagacagatacctgatatttaccctttggctggagggcgaactgggcatagaaggtagcaacaccgtagattttctccagtggtatgccagtttcatcagagatcatggtctgtacttcaattggaagataaccataaatgtcctgtgccttctgcatgattggcatcagggcgcctttcgtgcctttaagctcggaaatcacttcttttaaagcggcttcctgctcttttgtcccgctaaacaggacaccttgttttttgcaagccattttataacctccttaaattgttgcttatgcaatgtatctaacattctaccatgatattgagaaaaaatccataggttcggagagattcgacaaaaaaataacgatatatataggtaaaaatatactgattaagcaattgaaaacatagaaaaatagtaggaaatagtgaaaaaatgcgccggggagtcggttttcataagaaattatataaaaggctttcctttccagagaaaaattactataatctacttatgaattgaaaacagatcatggctgaagtgataaaatcatcaaaaaggagagtgtatgtatgactgctaaagatgttagggatgttttgggtgccagggttctggttggtgaggatcatttggaggtggaagtgcggagtgcctgcggttccgacatgatgagcgatgtgctggcattttccaaggatcattctgtgctgcttacaggactatgcaatccgcaggtgatccgcactgctgagatgctggatattgtctgtcttgtttttgtcagagggaaaaaacctgatgaggccatgctggagatggcaagggagcggaacttaattgtgatggccaccggccaccggatgttctcggcctgtggaatgctttattcagccggacttcatggaggtgcgatctgatggatgatgtgattactttaaactatcacatatcgccggatgacttcaccagagcgggtgaggccagcagcgatgtgaagggaaagctaaagcagatgggcgtaagccctgacgccgtgagaaaggttgccatcgccatgtatgaaggggagatcaacatggtgattcatgcaaaaggaggggagattacggttaacataacgccggaagagatcgagatgatcctggccgacgtaggccccggaattcctgatgtggagctggctatgcaggccggatactctacggctccggacgaagtgcgttccctgggctttggagcaggcatgggcctccccaatatgaagaaatattcggatgtgctggaggttgatacaacgctgggagtgggtacaaccgtccggatggtggtgaagatagtataatctgggggtgaaaaggtggataaattttatcattcagtcagactggatgcggatctgtgcatgggatgcattaactgtatcaaacggtgtccgacccaggcgatcagggtgagaaacgggaaggcccagatcaacagcaaattctgcattgactgcggcgagtgcatcagggtatgcccccatcacgcaaagcatgcgacgtatgacaagctggatgtgctgaaacagtacgagtacacggtggcgctgccggcaccgtccttatacagccagtttaataatttagacgatgtgaatatcgtgttaaacgcccttctgatgatggggtttcacgatgtcttcgaggtgagtgcggccgccgagctggtctcggaggctacgagagaatacttaagtgagaatcccgaccggcttccggctatcagcacggcgtgcccgtcggtggtgcgtctgatccgcgtccggttcccgaacctgattccgaatctgctgccgctcaatcctcctgtggaggtagcggccatcctggcggcggagaaggccatgaaggagaccgggcttccgagggagaagatcgggatcattttcatatcgccgtgcccttccaaggtgacgtacgtgaagtctcctctggggacggaccacagtgaggtggaccgggtgctggccatcaaggatgtctacccgcagctgttgtcctgtatgaaggcggtgggagacgatccgccggagatcggaacttccggcaagatcgggatcagctggggacggagcggcggggaagccagcggtctcttcacggaagagtatctggccgccgacgggatcgaaaatgtcatccgggtgctggaggacatggaggaccagaaatttacgaacctgaaatttgtggagttaaacgcctgcaacggcggatgcgtcggcggcgtcctgactgtggaaaacccgtatgtggcggaggtcaagttaaagaggctgcggaagtacatgccggtggcgagaagccatattgaaggaaacgccgaagagcttgtgaaatggacgaaggaggttcagtatgagccggtattcaatctggggaacaccatgatggagagttttgcgaggctaaaccaggtggaacggctctgcaagaagcttccggggttagactgcggttcctgcggtgcgcctacgtgtaaatcgctggcagaggatatcgtgcgcggggaggcggtggagtctgactgtgtatactatctgagggaaaatttacataagctgtccgaggaggtgtccatcctggcggacgatatcgccgcaggcaatgcggaaggctatgagatgttaaaggtcatgacggaatatatccagagaatttccgacgagatgtctctgcttgacagccgggatgagaaggagaaagatcaggaatagggaaggagcagaaaacagtatgacagttcaggagttgatagacagcggcatcttcggcgttgtgaatgccggtgaggggctggaacgggagatcacaaaaccgttctgctgtgacttactcagtattgccatggggcgcgcaccggaagggtgtgcctgggtgacggtgatgggcaatatgaatacgctggcggtagcgtctctggcagacgcggcctgcgtgattatggcggaaggggccgctcttgatgaggcggccaggaagaaggcggccgatcaggagatcacggtactggagacggaggaacccatctttgaggcggctctcgccgtctggaaaaagcttcaggcggggacgcatgaagagccttagctacgatctgcatatccattcctgtctgtcaccgtgcggggatgacgatatgactccagggaatatcgtcgggatggcggcggtcaagggtcttgatgtgatcgcggtgacggaccataattcctgtaaaaactgtccggctgttctgcatttcgccggggaatacggcgttctggccattcccgggatggagattaacacctcggaggaggttcatgcagtctgtctgttttcgaacctggaagcggccatggccttcgattcctacgtttatgacaggctgatgccatttcccaacaatgaggaaatatttggaaaacagcagttatataataaggaagacgaagtgtgcggaacggttcccaatcttctgatcaacagcgtagatatctccttcgacggactgtgggagctggtgcgctcctacgacggggtgatgtttccggcacatatcgataagacggccaacagcctgattgccaacttgggcttcgtgccgccggacagccggtttacgactgcagaggtgaaggatttgaaaaagctgcatgaactgaaacggagcaatccgtatctggacggctgccggatcatcagcaattccgacgcccactatctcgaggatatccatgagccggagcttacgattgaggtggaggaaatgagtatgagaggcgttgtggactgcctgctgcggtcgttgtgagcatagcaggggatcatcagactgcggcagtgcttaagtccggccaatagagaaagaagcgatctgtgcagaagatgtacaggccgcttcttttctgtttttgcgttaatggattccttctgccgtacacgcttccggaatctcgaagttctctgagtggaaattcgaatagaagcggccgcccaaggcggtaaagcggaggacacagtaatccgggtccgtgacgccgcccgggtaatacatggtgtcgccctcccgccagatcatctccctgctttcgctgtcctccaaaacctccatggttcctgtcagcatggcgccgcggaagaagcggctgtcacagacgtatacacacgccttcggattttcacggaactggccgaccctcatggaggaggtatttgtagtgaaatagatggttctgatcccatcccgtttccgcggccgcagcatggccttgatattgggaaatccatccggggaaacggaaccgatccatgcgacactctgcttatcaagcatggtccctactgttttctctgcgtctttcatgggtaaatcctccttttttctcattatagaccggagggagctgtgtgaacagtacccacttttttgtaactacagcagtcccttttctctcagaaaatctgcccgcccatcctccgccatcatgtcgattccgacgctctgcatgatggtgactgcctcaaaaatcttcctgccgcgttcggttaagtagtattccaccttcagcggatagccgtcaaaggtatgtttgccgacgaagccgtactgagccagttcgcttaactgctggatcagcatcttctgggagattccggcgatctctttcttaagagcggagagggagctgccgcccttgcttaactgccacaggatgatgggcttccatttgccgcggatcgcatcgtgggtcagttccagcgggcaggtgtattcggttcgctgtttcattgatgatacctcctgatgatggttgtcccggagagtcatgttccaacattctctaagccgggcggattgattttttgtattcggtgggggatacgcctatttttttcttaaagattctcgtgaagtagttcacatcttcaattcccacatagtaggcgatatcctgaatctgaatatcggtggtgttaagcagtttcagcgcggtgtcgatccggcggccgttgacgtagtccgtcagagtcatagtcatctcccggcggaacagggaggagaggtagctggcgttgacgctgaacatctgtgataaggattttaaacttaagtctgagcttaaatttaagttaatgtggtttaagagatcacggatcagcggcgggtagttcttgagagactgattttgaacgagtatacagtatttccttaccatctcaatccgcagattttccagctggagacaggaggtcgaagcttcaatctgaacggcgtagtgatgggagatttcgtctaaatatacgggatggaccaccgctttctccgccgccttgcgcagcagcgtgttcagaacaatgattagattcttgctgtcgcggatgggatctttatatctgggggcgatccggaagtccaaaaacgcttcaaaacggcggacagccagaacctgatctccccgcatgacggcatccagaaattcattttccgcagcatagcgtttttccgtcacgtggatggaaaatgcatgttctggatcgggaacatagttccaaccgctgtactgctcattccagtcctctgtcatgtaacggatggtgagatcgtggtgatcctcatataagaaggcggcaatgtggttcaaagccgcggtgatccgggcgggatccacgatggataagttctggtagtacttttttaacacgggaagcgtctccagagtcagccggttccggttaatcgcccggttatacaggaactcgttggcctcctctgtcaggtaggggccgacgagaaggcagccgcaatccttcttttcaggaagcggcatgagaatatattggctgaaaaaatgatccgtgatgctgtagatgtatttttcctcagccctttccatcatactgcaaaataattcctttgcatccagtccggtgaagatggattttcggagggagtaatcaatatctgccagttcggccgaatcgggaaagagaacggaggtctgcacgccgagtgtggttgagagaagagtggtcatcagatcgatgacggctgtctggggggcatggctcataggtgggattctcctttataacatgatgttaatactacattttttttgtattataccatagaaaacaaatattgtgctgataactacaaaaattatcctcaagatttttttacatttatggtaaagtttttttatcgaaagagataaattaacctttaggaggggacatgttacatggaaagaaaatttggtttcagggataagatcggttatatgtttggcgacttcggcaatgattttttctttatgctggccagcacgtttcttatggtattctatacgaaggtactcggcatcagtgcggcggcggtaggaacgctgtttctggtggcccggtgtgtggatgcatttacggatattaccatgggacatatcgtggatactgccaggatcggaaaggacggaaagttcagaccctggatccgcaggatgtgcattccggtggtggttgccggcgttttgatgtttaatccgtttatcgcggataaatccatgacatttaaaatggtatatatttatcttacctatttattctggggaagtttctgctatacaggaatcaacattccttatggttccatggcgtcgggaattacctccgatccaatcgagaggggccagctttccacattccggagtgtaggcgcggcgctggccggcgtatgcgtcaatgtaggcgttcccctgtttgtgtatgcctatgagggaggaaaccaggttgttatagctgaccgtttcttctacatcgcctgcctgtttgctgtcctggccctgatctgctatatcctgtgctacagcctttctacagagcgtgtaaaaccgcaggtgaaggaatcgaacaagggcagtttcgcaaaagccgtaaaaggcatggtacataaccgcagcctgctcgccatcatcggagcggcgatcgttctcctgctttccatgctgctgtctggaagcatgaatacgtatttatacatggattactttaagagcaaagaggccatgtcgctggccggtttcttcagcaccggtgcaacgctgattcttgcaccgttttcgactgctattttaaagaagttcggcaagaaagaggcctctgcagcttccgtattatttgcttccgtgatttactttattctgtttttcgtcaggattcagaatccctgggcgttctgcgtcatgattgctttcggcaacctgggaacagggcttttcaacctgctgatctgggcatttatcacggatgtaatcgattaccaggaggtacagaccggaagccgcgatgacggcaccatttacgcagtctattcctttgcacgtaagattggccaggcgctggccggcggcctgggcggctgggtactgggtgcgatcggttaccagtcctccaaggcgggagaggtcatcgtacagacggattctgtaaccagaaatatttacacggtggcaaccctggctccggctgtctgctatctgattgtcggcctgatcctgctgtttgcctatccgttatccaagagcgtggtagaggagaacaaccgcattcttgcagagagaagaaccgctgcgaagtaaagagaggaaccatataacggtaaggaaaggtgaggaaacaatgggagatgtatttgagaactttcagaaaaaacaggagtatctgatctgcatcgattcggacggctgtgccatggatacgatggatatcaaacatttcaaatgctttggcccctgtatggtaaaggagtgggggctggagccgtggaaagaggcgctcctaaagcgatggaatgaggtgaatctctattccatgacccgcggaatcaatcggttcaaggcattggccatcgtactccgagaggcctccgaagcgtaccggctcatcgatgggatcgatgcgtttgtccgatggtgtgagacggcgccggagctgtcgggcgaggccttgtcaaagatggagaagaacgaatccagtgtgtgttttcagaaggccctgtcctggtcaaaggcggtaaacgaagctatcgaaagacttccggaggacgtgaaaaagccgtatgacggcgtggcgcagggaatccgggcggctcatgaaaaagccgatattgccattgtttcttccgccaataaacaggccgtggtggaggaatgggagcggtgcgggcttctttccttaacggatgttgtgctgacacagacggagggctccaaagcatactgcatcggccgccttctggaggccggttacgagaaggaccacgttctgatgataggagatgcgcccggagatcatcaggcggctctgcagaacggcgtctgcttctatccgattctggttaagaaggaggcactgtcctggaagcagttccgaaaagaggcgctggagcgttttcagaatgacaggtaccggggggcgtacgaggaacggtgtattgcggattttgagaagaatttgggaaaaggagagaacaatggttaatttaagagaaaaaccttattaccttaaggatgaagatatcaggtgggtggaagacaccatcgcatccatgacggatgaagaaaaaatcggccagctgtttgtcaatatggtgacctccagaaaaccggaagatctggagaacgtggtaaagaactatcacgtaggagcgattcgttatcacaatacctcgccggaggaattgtatgagcagaaccggattctccaggaacattccaggattccgctgctcattgcctctaactgtgaggcaggcggaaacggaggcgtaggcggcggtaccgcagtggcctgcggggcagcgacggcagcagtggacgatgaggagaccgcctatgaggtggcaaggatcggagccgcggagagcgcggccatcgggtgcaactggaattttgcgccggttgtggatctgctctacaactggagaaataccattgtccagtgcagagccttcaacaacagcccggaggatacgattcgttatgcaaaatcatttttccggggaaccagaactcagaatatggctacctgcatgaagcatttcccgggagacggaaccgaggagaacgaccagcatcttctcatgggcgtcaatgacatgacctgtgaggaatgggacaataccttcgggaaagtatacaaagaactgatcgatgatggggtcatgaccattatggcgggacatattgcactccccgcctatacgagaaagctgaggccggatactgcggatgaagacattctgccggcaaccctgtccccggagctgattacggatttattaaaaggacgcctgggattcaacggtatggtggtgactgacgcctctcatatgatcggcatgtttgccgccatgccgcggcgggagcaggttccgcgggcaattgccgcgggctgtgacatgttcctgttcttcaatgacatggacgaggactttggctacatgatggagggctacagaaacggcgtgattacagaggagaggctgaacgatgcgcttcaccggattctcggaatcaaggccgcgctgaagcttcataagctgcaggcagaaggccgtctcatgcctcccagagagcagttatcggtgatcggctgccgtgagtttcgggaatctgcggcaaaacaggccgacaagtttattacacttgtaaaagacacgaagcattaccttcccctgacactggagaagtatcagagagtgaagctggtatttatcggcggagagggaacggtggtcgcgggtaagctgcagtcggacgacagcgcgcctgtgaaggagatggtcataagaaagcttacggaagcaggatttacagtggacggtgagacaccggccgtgaaaggaaagatggaagacctccgtaaaacgtacgatgtgtgcctggtggtacttaacgtatcgggatttgcacagtacaataccatgcgtgtaaaatgggcgcagcccgcggatcagccgtggtacgtatcagaactgcccactgtcttcctttctctgaactttacgaatcacctgatcgatgtgccgatggcaaagacgtacatcaacgcttacttaaattcggaggaagcggtctctgccgccatcgataaaatgaccggaaaatcaccgtttaagggcagatacaatgaaacggtattctgcggccgctgggataccagaatttaatcagaaccagtctttttcctgcactcccggtctccggggaaggaaagctgcgatagaaaactcccctgtcggaatggattccattcaaacggcaggggagtttttcgtattacgatttcagttcctttacagtcagaccattttcgcggccctgcttcctccagccgatatgagcggcggctatgtagagcgggcggggaatggagagggagaagaagcgatcgtttcccttttcaaggcgctcgatgtttgcggccatatccgtcagggcagcgcccaacggcttttttggcccctttaccagggggacgccttttaaatgggccagcatgcccccggcgccgcatccaatgccctgtttatattcaaatccgcagcgttcgcaccagttctccacaatacgaagggcaatggcagcctgctttccctcataaaatccgcagttgacagcagcatatacggccagtagtttgtcgccttccagaagcctgctttgattctgccaccgttccagctccgttaaaaaggaaagcaggtgggacggtataccgtccacatagagcggaaaggagaggacaaggaagcttaagccgccaagctttttctgctcctcgggggagggctcccagtgcatgccggtataagccggggaagcagccggatgggcggcggtgacggccatggcggcggtctctgtatcgggagcgagtaaagaccttaaatcgtccagcagtacaccggaagcgctgccgtttctcttgggactgccgtttattaaaatacctttcatgtgatattcccccttatctgttccggtgtctgataaaaatgtacggtgaagccggaggctccgagattgacggcgttggcctttaccatgcggttcgcggtctcttcttcctgctttgtgatggagtctccatagaaatgtgccgtaactgccatctggttgccgtatcgcatgacgtggtgcatctctccgccgatgatgcggaaaaacggctgaagatagccgatgctgcggtccagcacatttttaacatgggggctgtaactgccataacagcagcggctgataaggatgagctcgctggtcctggacagaagcttccccatctcctgataggaatcaggaagcacgcagctgccgggagtcttgatccagcagccaaaacagccgatgcaggggcggaccggatacatgggggagagaatgacggcaggcggctctgaggttccgagtcttgtcaaaagtgcggtttcgggaaacagctcttcaaaagcggcggggtctagatcatggatgattgttttcacagaaggggcctccttatggttttggtgtctgtccggcaagctccatacaccagccgatcagcatctcatagtagcggattccgtagacgagcacggaatagtggtacgtatggcggcattccgggcagctggaatccagttcgcgctgctgggccctcagctccccgagtcccgatgaagcttcttcgataaactgcgttaagttccgtcctgccgtctcagcgtctaagcagtcataaaaaaagaacggaacgagatgatcaaggcgggtttttgagaaatggaccggctgtttcagccattcgagaaaatgtttccgtccttccccggtaacggaatataactttttgaactttccgcctgttacctgttcctcagaacacaggaacttcttttcctccagcctttttaacgccggataaatgcttccgtagcttgcgtcaaaaaaataggaagtgctttcggccatatactgcttcagatcatagccggtggcttttcggcgcatcagaaaaccgagaataatgtattccaacataatattacctcctgatatatatcaaaacgatacataacttaatgatactatagcaggaacactgtgcagagtcaagcctaaatttgtcttcggtttattcataagccggaacagaaccggtaattttttaaaaaattatagcagtgcagccggtatatttgaaaaattcccataatatttgggaatttctacttcctggttgaacatgatatgcagttgttagaaagtttaaagtatgataaattatacttagcggaccggaggcagtctttatggcggtcactgcgccggagatccggtattacagcatcagatgtcaatgaaagaagaaggcaggaactacgcttatgaaggaattgctgttgcgcgtctcacaggagggcatacatggattatacttattggtatttactcttttaatctggctggtattttttctgatccttgctgccaatcctggaaataagatcaatcaatggtgctttgctaccggatttttatgcggtatcggcacgtttaaagaatttttgtattatgaactggcaggactgatccattcgccggccgcgcatgcgataccggactggctctattctgtcatgagcggggtattttatttcttttccctgccgtgtggtctgatctgtgccctgtatttttcccacgaagatgtaaaaaatccctctgcttttcgaaagaagcaggcagccagtttcgccctggcagtggtgatgattcttatctttccatgtacgcagaccctgtattaccagagtaaggtctcattttgtctgagtactgcggcttacaactggttatacggtatcattctgacctcgatcttattaaaaacgctgcgggaggaacggctcagcgcaaactataaccagcgcatgctggtaacggcgagcgtgctgcttccattatggtgctggcttattgccggatttccgtatcatgcgctgggactggagggattttcaaaggcgtggcagatcaacctgattataatcgtcgtgatcctgctttttattgtgtaccatgcgtttcacagcggaatctggggactccgcattcgcggtgaacagtataactggagttccgatgaaaaactgcttcagaaaaatgcccattatgtgggacatgccctgaaaaatgatcttgctaagatctcatggtgtaccggcctgctccggcaggagcaggtccggatgaaggaattggacatcattgagcagtcggttgctcacctggaaagcttcgtcgcacggacgcagatgtattcagataggattgttttaaaacagcagttctgcgatatcgtacagatttttgaggatttaaaacaggaactcatgctgccggaaggcaaacagattcagatatgcacctgtgatatggatccgcttttctgtgatcccgttcatctggcagaggtgcttcgcaatctgatctggaatgccgctgaatcgattaaggaggaggggctcattaagctttcataccattgccagaagaacagacggcaggctgtcattacggttcgtgataatggatgcgggatcgaaaaagacgatttgaaacggatatcagaaccgttttacacgaccaagaataacaaccacaatatggggcttggcctgtattactgctggaatgtcatgtgtgcccactccggaagactgcaggctgactcggccgcaggagaggggagctgcttttccctgtattttccgtacgtaaacccgcagaaaggagcatctcgtgaaaaaaataaaaatcatggtggtagacgatgacaaagattttctgtatctgattcagcagacactgggaaaagaagccgatttcgatgtatgttccctgtgcagcagcaaaaaaggcgcccttccggccgcgcttactgattctcctgatcttgtcctcatggatctgaacctggaatctacctggatggacggcgtggagactgcccgcgccatacggatcgagacaaatgcccgcattattattctaacctcatttgaccagccggaaattatactggacgcctgccgccgggcatttgcttccggctacgtactaaaaaatcagttctccatgctcatccccaccattcggacgacgtattcaggaataacgccgcaggctttgctcatatgcagtctgatactggaggtactgtctcccgctgaacgggctgttctggaccagatgctggggagagagataacgctccactccaaaaacaagacgattgccaaccagcagtccaatatactgcgcaaactggagctgtccggcaaacgggagctttgccatatcttttccgcctattataccagtctgccccgggagaacgaaaacagcggcacgctgcctcactgaggcagaataatctacagcacggaccggcaaagaacggtttttcggcgctaaaaagcaagtgacagttgacgtaccctttttctttcatgtacaataaaatgagatgccgcctgttatcgagtacagcgtcacaggcgggaaaggaaggggtatgagaaatattttcgcgaaataccgggagattatcctcggtctgctgattctgatattattggccgtgtcgtggctgttatatgcgagaactctgaaaaacgattttcagaatgagatcatctcatctctggaggaggtatccactcagggggagaatattctggaaaaagagatcaatgcgaaactggaactgctgacggaggtttcacgccgcgtcagcttctatccggcggaggattatgaggaggctgcctccatgctggccgccaccgccatggagaatgattttaagcggatggggattatctcagcagacgggaagacgtatacaacggatcatgtgcagatggatttatctgaccgtccttattacaaaaaggcgatggagggggagaaatgcgtgtccgatcctctccgggacagggaagggaatgaaaagattcatgtttatgcagtccctgtgtatcatgaggatcaggtgaccggcgtactgtttggaacgtataatctgaatgagatgcgcaagcagctggaggtatcctcttttgaagggcggggatatacatatattgtaaatacagacggaaactgtatcgtagattctgttaatccgaacagctatcccgatcttcagaatatcttcgacgcaatcgaggaggtggacagccagaattcggaggcggccgccgccatgaaggcggattttgacttaagacaggagggctgcatccggatagaaaaccatggcatgaaatacatgtattaccggccgctgcccatcaataactggtatctgctcaccgtggctccggccagtgtgctggacagcaaaatgaatgcagtgctgggacggacctacctgctgggggcgtttatggtgctgatctttgcggggattctgatctatattctgaaggatcagaagcggagaaaggccgagctgatgcacagcctgtacacggatgagatcaccggcggttactccttcgcaaaattccaggttgaggcggagaaaaagatccgccgggcagaggtgggaagctggtctctcatcagtctggatatagacgattttaagtttatcaacgaacttctgggatacgaggaggggaatcatctgatccggtatatccatggagttctgggggaatggtgcggcagtgaggagatttttgcccatcagtctgcggatatgtttgtggccctggcagacagccgcgatcacgatgtgctgtgccggcgcctggaggaactgtgcagccgccttcagtcgtattccatctggcctcagaacaagctggccatcgtgccggcgttgggaatctttcagattcgtgacaaggggcttacgctggatttctgtctggactgtgccggaattgccagaaagagccggaaggggcagtttgccgttcactatgcgttctatgatgaacgggtaaaggaacagatttaccgggataagcggattgaagccgagatgaagggggcgctggagaatggggagtttcaagcttactaccagccccagtatgatgcagagtccagacggatcgtaggggcagaggccctggttcgctgggcacggcctgacggcgggctcgttccgccgggagaatttattccgttgtttgagaaaaacggtttcatcagcgagctggaccgttacatgttccggcaggtctgtgaacagcagaaggagtgggaagaccgtggatacgaggtggtgccggtatccgtcaatgtgtcgagaaagcttctgtatgacttgaatttcgtggaaaaatataacctgattctgacggagaccgcggtggatgtgcggaatgtggaaatcgagattacggaaagcgtcttctttgacaaccagccccggcttctggatgccatcagacatctgcatcagtccggttaccgcattctgctggacgatttcggtacagggtattcgtccatggcgatgttgaatgatatgtcgtttgacacgctgaagattgataaaagctttgttgataatatcggagatgagcgggggaataagatcgtggatggtatcatacgtcttgcggattccctggaactgagcaccatcgccgagggcgtggagacgagagagcagtacgagtatttaaaggcgcggggctgcgatgtcatacaggggtattactttggccggcccatgaccgcagagtcgtttggaatgcttctgagcagtcagacggccggcagataacgttttggtaagagggagtatgattccacaggatcggttatggaatctgctcctctttttgattctgggagagaatgagacggttaatctcctcggcttcatggcggtgtacggccgtaaagtaccggtcgatcaggaatgcgataaacagccagagcagtgtcgtgtaaagaaaactgctgatggtaaacgccgcccagttcagcaggaagcctgcaatcaggacaatgacatattccagggcataaaatgtgatctgatatgcttttttcgactggaacgggatgcggtcacatacggcggatacaaactggattaaaagaatgagccccgcgagttccaggacaaagatgctgctcagcgcatcgtgttttctcagaatcaggttaaagatgacgctgaacaggatgacgatggtaaaggcgatcgccgaactgggaagataggttcttaataatcgtttcatggcatttcctccttttattgggataacttttctttcagtgcaggaatataatttctgctgacaatgagtttttcgccgtttttcagcagggcctccagtctgtgattccacagaggggacacgcttttcaaccaggcggtatttacgatacagtttttgctgattctgacaaaggtggtgttggccagcttttcctccagggatgcaagcgtctcgcggctttcgtatacattttttccgctgtagaggaaggtgcgcccgtcagcggaatccacgtagatgatttcctcggaatgcaggtagaaggaggtctcaccgatgcgcccttccagcgaaaaggaatactgatggatatagtctatgagacgcttaagccgcgggtcggcaatatggcaccggatttcgatttcgggctcggaaagatcgagcccttcgtgcagtgttattttcatatgattctcctttttgtgatgtcccgtgcaccggatttatggtattattatagaatcggccggaagaaagaacaagggaaaacggccaggatgccctgagaggcgatgaaatacagacacaaagagaaggaggaggctattatggggaacgttatgggggaaaatacagatgatgagatcattctggaaacaaaaagactggtcctgcggcggctgcggaggtcagattacggtgctctctgcctgatgctaaaagatgaagaggtgatgtacgcctatgagcacgcgttcgaggactgggaggccgccgattggctggaccgccagcttatgcgctacgaaacgtatggtttcggcctgtgggccgtggtcttaaaggagacgggggaagtgatcggacagtgcgggctcaccatgcaggaggttggagacagcgaggtgctggaagtcgggtacctgttcagaaaggagttctggcaccacggatatgcgctggaagcggcagccgcatgcagggattatgcatttgagaagctgggagcggaagcggtttactccataatccgggagaacaacggtccatccagagcggttgcggagcgaaacggaatgactgtttgcggcagcatcatcaagcattattacggactggacatgccccacctcctgtatcgaatcagccgcgtggaataggagacggctttggtacagaaggcggggctgcgcccggcatagtttacttttcgttacacacctggaagatgaagaatttcaatagagatctattatcaaatgtatgatttataaatgtcaagacagttggaatctttagtttatgtcgtgggcttgacataagggggcagtaatccatgtagatgagaacggactattttatcttgtaaagttggcttgtgaaatacctggtatcgcagcgagacaaagaggaaagcaaaaagaagaaaaaataagatagtggggtacaatatggaataccttaatgcaaaagatatattacctgacgacttactaaagcaggtacagatatatgcatccggccaatgcttatatatacctcaaagacaggaaaatacgaaatcctggggcgaagtatctggctatcgcagtcaattgcaaaaacgtaatcgtatgataatcaataaatttgagcatggcattcgtattgaaacactttcaaatgaatactgtttatctgaagaaaccattaagaaaattgtatattcaaagaaaataacgcaggaattgcatttctatccaactgtggaatctgctaaagagtatgatgaacaaggattactggaggaatggatacatacgtacttattgttttttcgaaaaaataaagccttttctgatgggctatataaagaagaacgatattatataggtcctatcatgatgcccttatccctgtttcaaaggaattgcggaccagaagaggagatgaaatggcacgtaaataaagaaagctttgaagaaaaggtcagattatggattcataaaatcgaaaacaaagaaaatctgcctcctcttattattggatatgccgatgataaatttgaaatcaattgcaacagtccattatttgaagcattaatccgattgaacaaagaaatgtttgttattattatctggattacatcacaaaaagattataaaagttttaaacagaattacatgttacctgatagataatgacataaaaatgttttatcagtatgcagaatttagttataaccaaactttctattttcaaaaatgattacttaatttatgatacttataaagtcagattttacatcatactataaaatttgataatgattacaatcatataaatacgatattaacagagagattggaatatgaattatggaacattaacactggcaagacaatataatgatgcagggaaaataaaagagtggttacaattgttcttacgaaatgatggcaagaatattgccttagccgaaggtttattactggaagaaagagaatatcttgggttgatgaagctgaagctgtctcttttaaaagatgtaaaacaaggaacgcctgaataccttacggatcagaatagcatagattatttctggtatgtggttgagaatatgaaaaataatagatgcagctgggatatgcctccattgattgtacaatttgcaaatgggattttttacgtcaacgatggcagacacaggttagaaatgctcaggcaggttaacgcagatgagactgatgccgttgtatggacaacaggtggggaagacaaacagaaattttatactttgattcatgaaaggaggctgctatgattagaatatgtccgaaatgtcaaaattataaatgggataaagaagtagtgaatgatacaatacgttgtccaaaatgtggaatgacatggcagtttaaaaagagaccattatatatactggcaggctgtagtggtgtaggaaaaacaagtactggcatggcattgcaaaaaatgtcgcaagaatttgtagttttagactcagatatattttataacattatggctcatgaaaccgaagaagatgaatacgagcgcgttgagcaaatacaaagcttatccagtaatatctctcaagctggaaaatctgtagtctggacaatggcaggaaatatagataaattgaacaaaacttattcatcccgtttttttagtgaaataaaagtattagcattaacatgtacaagcaccgaactccgtcgcagaatgacagaagggcgtgggatatccgacgaagaatggttaaaagggtcatctgattacaatgaatatttaagaacacatacgaaattagatgaaactgaattcgattcaatagatatcaccaattttactccagaagaagccgcaaataaggttttagcctggctgcataattagatgtttttcaattcttaagtaattacgatatcaaaaggtcttaccatacaacgaataaggtaagaccttttttatttatttcctttaaatttgactaagcataactaagttccaacgttatttcaagagtggtattatagttcttccggctaatccttccgaaccttacttctcgtcacacacctggaagatgaagaattttaaataataagaggtttcatctgcagaccagagtatgggatgatccggggcctgggtccggtattcgacctggcggaggcgtttatggacattggaggccgcctcccggatggtcttttcaaacagttccggagtcataaagtgagaacaggagcaggtggctaagtagccgccatccgtcaccagcttcatgcctcgtaaattgatctcccgatagccttttactgcattttttacggagcttctggacttggtgaaggcgggaggatccaggatgacgacgtcgaatttttcaccctggcgttccagttcgggaagcagctcgaagacgtctgcgtagcggaagtgaaccgtgtcggaaaggccgtttaacgctgcgttttcttctgcctgggcgactcccagctcggaggcatcaacgcctaagacggaggaagcgccggccagaccggcatttaaagcaaaggaaccggtgtgggtgaagcagtctaatacccgtttgcccggacagagtctctggatggccagtctgttgtatttctgatccagaaagaagccggtcttctgcccgtcttttacatctaccatataatgtacgttattttctacgatttccacctttgtgtcaaagggatcgccgataaagcccttgaagcgttccatgccttcctgcaggcgtactttggcgtcactccgttcgtagacgccgcgtatgtggattccgtcttccgccagaaccttctttacctgatccagaatcatggtcttgaaccggtcaatgcccagcgcaagcgattccacaacgagaacgtccgcaaatttatcgatgacgattccgggaagaaagtcagcctccccgaaaatgatgcggcagctggaggtgtctgtcgtcgtctttctgtactcccacgcggcgcgcaccctcatttcgatgaaggcgtcatcgataacggcgtctttttttcgggacatcatgcggaccgtcagacgggagttggtattgatgaagccgtggcccagcggataaccgtcaaagtcttccacgaataccatgtccccgttggtgaaatccccttttatggtgtcgatttcattgtcataaatccacatgcctccggcctttagtgagcggccttcgccttttttaatccttacaactgcagattccattttagttctcctttgatatattaaaactggtttttcagtctggttaacagatgatagagcggttcaaacaacagaagtgtcacggtaaagttgctgatgccgtggatgatgtcgaaaggaattccggctgtccaccaggcaagggcggctccgggaccgcctgtaaaaaagtaggaaacagcacagagcagcccgaagagcatgccgaagattccggcaagcagtgcggcggaaattggccgcggtttaccggtccatcgcatgagaaacacggctgtacacaggaatgcccatacgtagagataagaaaaccaccagaggccgaagccgtagatcagtccctccagaatgacgaacacgtagaggatgatccagacatggcggcggaatacgagtgtatacagaatcatcaggagagacaccagctcaatattcggaagccaggagagactgacctgcagcaccagaaggagagcggcaagaaacgcgtcgcggacaagttcctttgttttcatggtttcctcctcactgcgaacctgtaagcggccaaagaaacggcggttccatcactggtccgccggtgtatagacaagtttgtagtgttcgccgtctttaatgggctgcatactgatgccgtagttgcagggctcatcgtttagaagcagcgcccagtaggcgccatcctgtgtgtagtccgcccgcactccattgaccgtggttatcatcagaccgtattcttctgtgactgtgccgtccagggtgagctccggaatggcgtccgctgctccttttaagtactgtgcttcggtggtgacgtgatagctgtcttcttttccgtctttgtaaactacatcgatggtgatggtcttgcttccaaccatgggaaccggtttggaaatgttatagataaccagcagcagtgcgagcacggcaaccgctacgcaggcccccagaaacggggaggggcgtttcagtctcttgtgtctttgtttgtctgtattcatcattaaagtcttccttctgttcatctgaaatcttattctgactaagtatagcatagggaggtggggaaactcaagaaaaatgagggagatgttgattcttttttggagggaggcaacgccccatagcttccgggcggcgcggggagtgggagggacgggggatcgaaccgtttctcgtttcttcggtggcaggtactagagcagacaggcaggaaaaaggggcggatcgagaaaactccgccgaactcctgaaggacttcgcctccgtgttctcttgaaagttggctttgaggccaactttcaccacccctttttcctgcctgtctgctcaagttcctgcgaacctcagaaaaggaaacagttcgctcccccgtccctcccactccccgcgccgcccggaagctatggggctgtgtactggctgtatgagggaggggaagaataaaacaggtggctggtaataagaaaagacttttcgagtgggagggcatgatgtataatgaggggtaattggtaagcaggcaccagggctgatgaggcagggctggtgagtgagcaggatgggaaagggagataagaatgaaagaaaatcagaatataagacaggaaatcgatgagtgtgagaagttattgatcggtctgggggaagagtggagggcggagcttgttccggatcttgatgaggggtatgggaagctggcggagttgacggagggaaaggatttttttctggtgactacggtgacggacgccaggatttttgagtcagggatcgaggcggcgaggattgtggcgccatgcggaaatgagacgtggcgccagtgctcacgctcctgtacgaaggatatctgggagccgggggagattccggaggatatttgcccccactgcggcgctccgcttacgggaaataccattcaggcggaaacctatattgaggagggatatctgcctcagtggaaccggtatacggcctggctggccggtactcttaataagaaactgctgattctggagctgggagtggggtttggcacgcctacggtgatccggtggccgtttgagaagacggtatcactgaataaaaaggctcatatgtaccggatacatgggaaatttgcgcagctttccgctgaaatgggggaacgtgccgtgtctgttccgatgaattccgtggagtttataaggacgttatagaggattggccgtctgagacaccggaggaggcggctgcagccggaattggtgtaatcggcggttgaatgttgaacaatgagggttcctgtgatagaatgttgaaaaaaggcgatacgaggtgacggccatgatagcgattattgattacgatgccggaaatttgagaagtgtggaaaaggcgctggatgcattgggagaacagccggtcatcagccgggatgaaaagacgattctttctgcggataaggtgattctgcctggggttggttcgttcggagacgccatggggaagctccgccaatatggactggtggaggtgattcaccgcgtggcagaccaggggactccgtttttggggatttgtctgggactgcagcttttatttgaacggagcggggagagcgaaggggtctccggtctcggaattcttccgggggagattgtgagatttccggatacgccggggcttaaggtgccccacatgggctggaactgtctggacatccgtccggatgcaaagctttttaaaggactcgcttccggggaatatgtgtattttgtccattcatattatttaaaggcggagaaggaagaggatgtggcggcgtcctctgtttacggtgtccgttttcacgcctccgtggagcacggcaacgtatttgcctgccagttccatccggaaaagagcggtaccactggattaaagattttgaaaaatttcattgaattaccataggaggtggccggatgctgacgaaaaggattattccatgtctcgatgtacataacggacgcgtggtgaagggcgtcaatttcgtgaatttaaaggatgcaggagatccggtggagatcgcggccgcatacgataaggccggggcggatgaactggtttttctggacattacggcttcctccgataaccggagcacggtggtggatatggtgcgccgcgtggcggaaacggtttttattccatttaccgtgggcggcggtatccgtacggttgatgattttaaactgcttctgcgggagggggcggataagatatccatcaattcctctgccatcaatacaccggaactgatctccgaggctgcggataaattcgggcgccagtgtgtggtcgttgccatcgatgccagaaggcgggaagacggaagcggatggaatgtatacaaaaacggcggccgtatcgatacggggctcgatgctgtggaatgggccatgaaggcggaccgcatgggcgcgggggagattctccttaccagcatggactgcgacggcacaaaggccggatatgacgatgaactgaacgcagttattgcagactctgtatccgtaccggttatcgcatcgggcggcgcagggacgacagagcatttttacaatgccctgacgaagggaaaggcagatgctgcgctggcggcctccctgttccactataaggagctggagatcatggagttaaaacgtttcctggcggaccggggactgcccatgagattatagcggaggggatcaggcaggtaatacagaacaatacgaaaggaaattacagcaatatgggtgcgatcgataatgactggctggagccactgagcgtggagtttaaaaagccatattacagggaactttataagaaggtcaaacatgagtacgagacgagaagagtcttcccggaggcggatgacatcttcaatgcgtttcagtttacacccctttccagggtaaaggtggtgattctggggcaggacccctaccacaactacgggcaggcgcacggcctctgcttttctgttaagccggatgtggagattccgccgtccctggtcaatatttatcaggaactgcatgatgatctgggatgcgatatccccaataacgggtacttaaagaagtgggcggatcagggggttatgcttcttaatacggtgctgacagtccgtgctcacgcggctaactcccaccagggaatcggatgggagacgtttacggacgcggctattaagattttaaacgagcaggaccgtcccatggtattcttattatggggccggccggcgcagaacaaaaagagtatgctgaccaatccgaagcatctgattctggaggcgcctcatcccagtccgttatcggcgttccgtggatttttcggctgcaggcatttcagtaaaaccaatgagtatttaaaagccaacgggctggagcccatagactggcagattgaaaatatataagaatggagacggaaaataaaagatgagcataattgagacattaaaggtaatcgtacttggaattgtggagggatttaccgaatggctccccatcagcagtacgggccatatgatactggtagatgaaatcatccatttaaaacagccggaggattttaaaaacatgtttatggtcgtgatccagctgggggcgattctggcggtcgtggtcatgtacttccataagctgaatccattttctccgacgaagaaacctgcgcagaagcgggctacactggagttgtggtccaagattatcctcgcgtgtatcccggcggctgtcataggtcttctgatcgatgacatcatggaaaaatacctcatgaacggctatgttgttgcagccactttaattatctacggcgtcctgttcatcgtcatagagaatgcgaaccggaatcgtaattttgagatgcagcgggtgggggatatttcctaccagacggcgctttatatcggccttttccagctcctgtccctggttccgggtacctcccggtccggttccacgattctgggcgccatgatccttggctgctccagaggcgctgctgccgagttttccttcttcctgggaatccccgtcatgtttggagccagcttcttaaaaattgtaaaatacggccttcatttcaccggtccgcaggtcttttatctgcttctcggtatggtggtggcgttcatcgtatcggtgtacgcaatccgtttcctgatgggatatatcagaaaacacgatttcaaattttttggttattacagaattgtccttggagtgatcgtcctggtttactttgggattacggctttgattggttaaaagaagatatgctgatatgagactgacaaaaatccataactgcttacatgcacaggttaagcagttatggattttttatgcaattaagaaagctctttctggaccgccctcaggatcataacggagcgggggtgggccaatgcagaatagcggatcacctcatcccagccatcgacggtctcaggaatactgccgctgccccgtccggtatctgcaaggagattccagaagaacccttcagggagatgcggaagcgtgatcgtaagcggttcccagtaggtatttacggcaaggtagatgatatcctccgttccgtcgtcgtgtttgccggcatacatgatgccgacgtagtgtgtatacgaggtggtttcccctttccaggcctcggttccgtgtacgctgaccgggggaaaaccggtgctggaagagagcgtctcccgccggatcaccggatgggatctgcgtatggcgatcatgcgccgaaaaaattcatacagttcgtgattcttttgtaacagggtccagtccagccaggagatgccgttgtcctgacaataggcgttattgttgccaaactgggtgttgccgaattcgtcgccggcaaagaacatcggcgttccgcggctgcacattaagacggcgcaggcattctttatcattcggaagcggagctccaggatgccgggatcgtcggtttccccctctgcgccgcagttccagctgttgttgttattgtctccgtccgtgttgttccagccgttggcttcattgtgcttctcattatagctgtacagatcgtacagggtaaagccgtcgtgacacgttaagaaattaacagaggaattgaagccgcgcgtggccggcggatagagatccggggaaccggtgattctgctgacggcagccgcagccatgttgtcgtcgcccttaaggaaccggcgcatgtcgtcccggtatttgccgttccactctgcccagcggttccaggaggagaaggaacccacctggtataggcctcccgcatcccaggcctcggcgatcagcttggcgctggagagtaccggatcgtaggaaagggattccaggagcggcggcttgtgaaggggcgtgccatcctcgcttcggccgaggatagaggccagatcaaagcggaagccgtccacgtggtaatggatggtccagtaccggagacagtccagaatcatctgctgcacaatcggatggttgcagtttaaggtgttgccgcagccgctgaaattatagtagaagccgtcgggagtgagcatatagtaaatctgattgtcaaagcccttgaatgagaagaagccgcccttttcgttgccttccgccgtgtggttgaagacgacatccagatagacctccatgccgcgttcctttatggtgcggatcagcgttttcagttcccggccttcgtggttatgctcgctttttgaggcgtagctggtgttgggggcaaagaaactgacgggattgtagccccagtaatccagcagcatgttcccgtttacgctgcgttcgttgcgcatttcgtcgaattcaaagacgggcatcagctcgatggcattgatgcctaagtcctccagatagggaagcttttcgataattccctggaaggtgccgggagccgagacgccggaagaggcatccctggtgaaccctctgacatggagctcataaataactaaatcctccatggggattggaggatggcagcagtcgtcccagtcgaaattatctgagactaccctcgctttatactgaaagccgctttccggcttagagccccatgtgccctggccggtaacggctttcgcataaatgtccagaaggtattttgttttgtcgaagataagccctttctttggatcatacggcccatcaatgctgaacgcatattctaaatcccgggtatccagatcaaatactatgatggagtagacattcccgatccggtaacggtccgggatggggattcttgcatacggttcgcgttcgttatggtgaaacaataaaagctcgcaggatgtcgcttcctgtgaatgaagagtaaagctgactcctccaggtatcagacgcgctccaaattcttcgtacaatccgggtcttacggaaaaaccggatatggtgtcaagtggtctgaaattatcggtgtacagtggcatatgagtgtcctttctgacagattatggttgaaacaacatctcaatccgtccttcggcggctttttcatccttgccgtcaaagtaaaatagtaaatttctgttccgcgttaccagtcctttcttcatctcatcatagttttttacatttactttcgacttgccattatcgatatagatatcgcagtcaaaacaattggccgccgtaattaaaacagctatggggatgggggtataacgctgataaatgtcaacttgtttcgttcgcatatcccagcctcctttttatggcgggcggataatccgtacgtcgggtgacaaaacattaagatactcttccaggaaatggttagtgaactgtgaaatatagataaatcattctatctatattctaccatatattttaatgcgatacaagactaaagcagaaaaataaacagtttaatgatgaaatttttgtaaaatatgtgtaaaaacaagggggagtcttaatgtgtcccgtaaagccggtgatatgcggagacctatcagacaacagagcggcagacttcctgtaaaagtggcggatcatacagatattgtatgaccggtacggatgaaaattgatacgatgcgaaagataagatagtcgctgccacccgtctaacgggtggctcgcgcttcggctataagcctttgttactaggccagcgtctcaaggcgctggctttcacttcgttcaagccactttgtgcttttacctctgttgccgccccttcaaggggctatctgaataccgactaacccctaaaggggtcttcatattctttcacactcaatttgtccagcatgatatctgccttctcctgatcttgtatatacttctttatggtgtcttcgtttaatcccactgtgcttacgtagtatccttctgaccagaaatgacgattcccgaacttgtactttaagttggcatgacggtcaaacatcattaatgctgactttcctttcaaatagcccataaaactggatacgcttatcttgggtgggatactcaccaggatatgcacatgatccggcattaatttcccctccagtatctgaacacccttataattacataattgttttatgatatctctcaggtcttctttatattgattatagatcacttttcgtctatacttaggggtgaagacgatatgatacttgcacatccactttgtatgcgctaattcattggctttcttcgccataaaatcactctcctttttaatagtggcttggacacctctattatatcaggctgagtgatttttggtataaccaacaccgcgcacccgcatagcgggtggtttctatttcgcgcgcttcgcgcactcaactgggtctatccgacccacaataaaaactgccgcccgcatgaaaaaaatcatgcgggcggcagttctctcttttttatgcgttttctgcaatctcataaagcagccgctcggaatcctcccatccgagacagggatcggtgatagactttccgtagcagtgttcgcccaccttctggctgccgggttcgatgtagctctcgatcatcaggcccttgaccagatctttgatgggagccgcgtgtcttctgctgtgaagaacctctttggcaatgcggatctgttccatgtatttcttattggaattggagtggttggtatccacgatacaggccggattgtccaggctgcgtttggcgtaaagctcctgaagcagaaccagatcttcaaaatggtagttcggaatgcactggccgtgtttgttgaccgcaccgcggagaatggtatgagccagcggattgccgccgctctttacctcccagccacggtatgtaaaatcatggccctgctgtgccgcaacgacggagttcagcataacggataagtcgccgctggtcgggttcttcataccgacagctacgtcacagccgctggcggtcagacggtgctgctggttctcgacggaacgggctccgatggctacgtaggacatgatatcgtccagataggtcatgttttccggatagagcatttcatcggctgtggggaagcctgtctcggcaaatacacgcatgtgcatcttgcggatcgcgatgagcccctcgtgcatatccggtttcttttccgggtccggctgatgaagcattcccttgtagccctcgccggtggtacgcggcttgttggtgtaaacacgcggaatgataatgaggcggtccgcggtcttctcctgtaccttaattaagcgttctgcatagtcgcatacagaatcctcattgtccgcggagcaaggacctatgatcacaagaaatttatcacttttgccggtcaggacatcgctgacttcctgatctctctttgctttccgttcttttaattcagcgggaagagggaagcgctctttgatctcatccggggtcggaaggttgttaacatattgaaatcccatggtatcctcctgaagattagattcttctcttttgttgttgcccattatataccagaatatcggaaaaatctacacctgaccgaaattttaggaaatgtgttcaaacatgggaatccgggtgttcctttttttacaaaaatagtgtatgatatgagaaaatatttgagaaaaggaaatggtgtgagagtatggaacgattctggacctggggcggcagatatgtgggagtcagacagaaggagtatctggtggcctgtgacggcacggtgctggggaagtttttcggcagagatatttatgatcaggatggatattatatgggtgaactggggagaaacgaccggctgatcaggaacaggacgaagtcagccacgcgcaggcccgcgttcagcagaagtgtgaagggcacgatccaggctcccctgcgggactgtgcaccttatccgttaatctatggatttgacgattttgaatggtaacgcatctgacacaggacgccgggttcgtaagagatctgtcagtattttgtaggagatatgctatagataaattactgtttttatattataatgaatccgcataagcagaacagaaaaaggagaaaattatgagaaaatcagtatatgtaactgcaatggttctgacagccataagtcttacagcctgcggaggcggaaagggcccggataacggcagttctggaaccgtggctgagagcacacaggcggtaacggtggatttagagaaggtacaccaggctgtaaaagaggcatatggagaaaactatattccgagcgcgccttatgacgcccaggcattaaacgatatattcggagttccggaggatttatacgaggaattcatcgcggaaggaccgatgatcagtgttcatgtggacacctttgccgccattaaggcgaaggagggaaagggcgaggaggtagcgaagcttcttgaggcttaccgtacccgtcttgtggaagattccgtgcagtatcctatgaacatcagcaaggtggaggcttccgaagtcgtacgccacggagattacgtcttctttgtgatgctggggactgcttcagacgaagcgcaggccgaaggcgaagaggcggctcttcaatctgcacaggaagaaaacaagaaggctgtcgatgcaattaacgcattttttgagggataaacatggtattttccagcctgttattcttattccggtttctgccggttctgttgattgtatattttgtcgctcccaggaggtaccgcaatggggttctgttccttgggagcctcattttttatggctggggagaaccggtgtatatctctttgctgctgttttccactctggtcgattacatccatgggcggctggtatggcgttttatggaggagggaaaaccgcagcgggccaggctctgtgtggcctcctccgtcatcatcaatctgggacttttaggagtttttaaatacgcggatttcctgatggagaccgtggggcggcttttagggattccgcttcccctgccggggctggcgcttccgatcggtatttccttttatacgtttcagaccatgtcgtatactatcgatatataccggaaagaggccgctccacagaagaatatcattgatttcggagcctatgtctccatgtttccccagctgatcgccgggccgatcgtgaggtatcacaccatcgcagaggaactgcgggagcggactgagaacttcgccggattttccaggggagtgtttctgtttaccgtgggtctgggcaagaaggtgctgattgctaataccacgggcgctctgtggacacagatttcgggcgttccggatgccgagcgtaccgttttgatgatgtggctggggattctggcgtttggcatgcagatttactttgatttttccggctattcggatatggccatgggactgggagcgatgatgggctttcattttccggagaatttccgttatccctacacagcgaaaagcatcacggatttctggcgcaggtggcatattaccttaagcacatggtttaaggaatacgtgtacattccgttgggcggcaaccggaagggcgcggcggtgcagatacggaacattctgatcgtctggctgcttacgggaatctggcacggagcggcgtggaattatctcctttgggggctttacttcggcgtgcttctgctgcttgagaagctgctgttaaaaccgtatctggagaaactgccctccccggtcagaagcgcatacgccatgatttttgtttttctcggatgggtcctgttcgcgcatgaagatatgggcggtgggcttcggtatctgatgcagatggccggtgccggaggcattgcctttacaagcaggagaacgtggtatttgctggtgaccagtctgcctcttatcgcggcgtctgttctgggctccacaccgctgccgggcactctgtgcaggaagatgaagggacgggtgagggagacggcggagcttctgtttgtagctgttgttctcgtgctgtctgtggcatttctggtagatgccagctataatccgttcctgtatttcaggttttagaagaaggcgaaaggctggtaataaggagaattatggagaaagaaaaacacagtggcagaggcagaggagtgacattcctgtttctgggctttttgggagtgctgtcgctgttgagtatcgtcacaccgcagaaggctttttccgattcggagaaccggtatttacagaaaaaaccggaattttcggtgaaatccctgctgaatggaagctatggagagaagtacgagcagtacttgagcgatcagttcccgggaagaaacgtctggatcggaatgaaggttacgacagaacgtcttgccctgcaggaagatgtgaacggcgtctatttcggaaaagacggatatctgattgagaagtttgacacagaggacctggaaggggagcagctgaataaaaatatcggaaagctggccgcatttacgggggccgcagagaaatctctggggaaggatcatgtcagggtgatgctggtaccgtctgcgtctcagatcatcacagaacgcctgccgtttctcgctgcaccctacgatcagggccgggtgaccgagatgctgtgcagaagcttaaaggaagcgggaggttcccgggagacggtgcttccggcagaagaatatttaaaacggtatcgggaagaagcgctgtattaccgtacggaccatcactggacagccagaggagcatatctgggataccggctgtgggcggagtccgtggggcttactccgtggacggaagagatgtttgatattcagacggtaaacagcgagtttcacgggacggtatattccaaactcaatgttccgtggcggtacgacaccattgaagtgtggcagccgaaggaagaaaaggattaccgggtatccttcgatggggagccgaaagaatacgattccctttactttcccggtgcgttggaggggaaggacaaatacgccgtgtacctcgacggcaatcatgccataaccaaaatcgaaaacaggagtatcacgggagatcagaaggagaagaaactgctcatgatcaaagactcctatgcccacagcttcgcggtgtttgccgccaatcatttcggaaccgtttatatggcggatctgcggtatctgaacctgaatttgaaggagtggatggaggaacaggagattacggacgttctggtgctgtatcagattccgggattcgcaaaagagaaatcggtgtcaaagctggtttatgacagatagcgggccggaaataaaattaggctcttgacaaataaatcgaaacctcatatactaatcaataacttcataagtttaaacaggcgttgataagaacaagtaataatacgcaaaagcacacagaaagcagccggccgatgagaggcgcgtggaaagcggattatgaatacatctttgagcttcacactgaaagccgatggaaaaaggacttaaggtcctgtggaccggtgagtagactgtgacggattcctgcacacgttatcgtgctagagtataagaatcgtactcgaaaaggtaaacggcgtgagccgtttataaattaaggtggtaacacgggattacagtctcgtcctttgaacaggacgggactttttttggtgcgcccggcggcgcacgtttctaaccggtgcaagtccggaatccgcccggtggtgggaaggatatagccgaaggcaagggtgtccatcgtgaggtggaatctgaaggaagctggatatggggaacatactaacccatgggcaaatctctggtctgacgaacagaaatcacatcaggccatgcgtgagggtaaggctgccaaacaagtcgaagcccaataaccacacggaatcatgtatggtaaatgtggcagatagatggagagaaagaaacgtgtggtacccggggaggtctgtgcggaatgtcctgaaagggataaccactatcgtgaggtagtgctgaacgtacagaagtcagcagaggtcatagtagtcgagagacgaaggaccgaatcaacaggagtctttagtacaaccgggaaaggaggaaagaacattgggtacagaaaacagagatagctgctcacaaagagacagcgcggaacgtgaagggtatgtgagagcgcaccgttctttccgccggatatggaaggaaagagacagtgcacagccggaactcttagagaagatactgaataaggacaacttaaacagagcttttaagagagtaaaggcgaataagggagcgccgggaatcgacggaatgaccgtagaggaaacaggtgactgcctaagggaaaatcaaaaggaactgatagagagaatcaaaaggggaaaatacacccccgacccagtaagacgagtagagattcccaagccagagggaggaatgcgaaagctgggcattccaaccgtgaaagaccgtatcttccagcaagccataggacagcagttaatgccagtctatgaggcgctgttctcggagaacagctatgggtatcggccgggaagaagcgccagggacgccattttaaaggtaaaagagtatgcagaacagggatacacccatgccgttgcattggacttgtcgaaatactttgatactctgaaccaagaaatgctattaaatatcctgcgcagagatgtaaaggatgaaagggttatccaatggataaagagatacctaaagagtggtgtcatggaaaacggtgtagtcatggagacagaggaaggatcgccgcaaggaggaaatctatccccgctgctggcaaatgtctatctgaacgagttcgaccaggagtacgagaaacggggagtggcttttgtacgttacgcagatgatatagtattgttagctaaaagtgagagagccgcaaagagacttctggaaacaagcacgaaatatctggaagggacgctgaaattgcaggtgaaccagaagaaaagccgtgtagtaagtgtatttgcaatccgaaattttaagttccttggcttcacattgggaaagaacggaaagggcatttatgtccgggttcatgggaagtcatggaagaaaatgaagtcaaaactgaaagaccttagttcccgaaggtctgttcagagcatacgcccatcgttagaaaagataaaggtgtatatgcggggctggctgaattattatggagtagcagatatgaagaaccgaatagagggactgaaccaatggctatatcacagaatccgaatgtgtatatggaaacaatggaagaaaccgaaaacgaaggtaaagaacctgctgaaaatgggggtgccgaaagaattggcatggaaggcagggaacagccgaagaggctattggtttaccacacaaacggtagcggtaaatatggcaatgacaaaagaaagactgataaacagaggctattatgatttagccacagcctatcagtccgtgcacgtcaaccgttgaaaccgccgtgtaccgaacggtatgcacggtggtgtgagaggacgggagttaatcactccctcctactcgattatcacaaaataattacaggaaaaggagaaaacaattatgacagcatacgaagaactgaaagcccgcggcctcattgcccaggtgacgaacgaagaagagatcagtaaaatgatcaatgaagggaaagctgtattctatatcggctttgatccaaccgcggacagccttcacgtaggacattttatggcgctttgcctgatgaagcgtttacaggaggctggaaataaaccgatcgcgctgatcggaggcggtaccggaatgatcggcgatccgtcagggcgcagtgatttacgccagatgatgactgtggagacgattcagcacaactgtgactgtttcaagaagcagatgagccgttttatcgatttttctgaaggaaaggccatgatggtcaacaatgcagactggctgctggatttgaactacgtcgattttctgcgtgaggtgggaacacatttctccgtcaacaacatgctgagggcggagtgctataagcagcgtatggagaaaggcttaagcttcctggagttcaactacatgatcatgcagagctacgatttctatgagctgtttaagcgttacggctgtaatatgcagttcggcggcgacgatcagtggagcaacatgctgggcggcacagagctgatccgccggaaactgggaaaagatgcccacgccatgaccatcaccctgcttctcaactccgagggcaagaagatgggcaagacgcagtccggtgcagtatggctcgatccaaacaagaccacgccgtttgacttctatcagtactggagaaatgtaggagacgcagatgtcttaaaatgtctccgcatgctgaccttcctgccgattgagcagatcaatgagatggatcagtgggagggaagccagttaaatcaggcaaaggaaatcctggcttacgagctgacaaaactggttcacggcgaggaagaggcggaaaaatctcagaagagcgcccgcgagctgtttaccggcgggaatgcggctgatatgccaacctgtgaactgacggatgaggatttcagagacggaaccatcgatattctggatattcttcataaatccggccttgccggttcccgttctgaggcgagacgcaatgtggaacagggcggcgtatctgttgacggcaaagcagtcaatgatgtgaaggctgtatttgcaaaagagagtctgcagggagaaggcgtcgtagtgaagcgcggtaagaagaaatttgtgaaggtaattgcaaaatagaaccgggaaatgggacgctttatggggctgcagctccataagaatctgtaagatatgtaagatacagagggaagaggtaaatgcttgtggcgtttaccgcttccctctgttttacggttttcagctgtctgtgctgagtggtacgtatatcttaatgaagaacgccgtccgcatccggggtgaaggtcttcgccctggtcagcatttttccgttttcctgtaagtagtaggtttttccgtcaagcgtgaggaaacctgtctgcatgacgccggtttccggatttaagtaataccagtcgccgctgtcgtttaaccagcctttgtggaggcttccggtactgtcatagtaataccagcttccgtccctggaagaccagccgcgaggtaacagcacgtcacctgtgccgtctgtaccggctgagccggcaaaggctacgattttatatgcagtattggaaccggactgtgtccagacgagacatttcctgccttttaccaggtcctgcagggtgacgatatttctcgtgagataagggagaatctgtgtgtcggactgaacggtataggtcgtttggttatccgccttgatggtaccggaaacgccgtcgccggcaaccgttaacgcatcgactgtaatatagtccgggactttgaagtcggccgggatgctgcagagaatcatctctccatgggacatcggcggaagacttaacgtcatggccggactgatataggcgtaaatggtttcaccgcttgtcagtgcatcaagtgagacgggatatccgtttactgcgtccaaaattctggtttcttctgatacattgatgataaactcctgtcctgcaaaatctccgtcctggcgggtaatggacagtcggccgtcgctggcctgatttaccgttccatagatccggacggaagaaggagccgtacctgtgtccgcctttgatcggaacgcaaatccagaggcgaagacggctgtgacgcataaaagtgagagaagcagacttccggttaattttttcattgaaaacctccattaaattcgttgtgtttttcgattgctgccaattagattatagcaggttggaagaaaaatgaaaattaagaaaggtttacaaatacttacaatgataaaggggagatggaatggtaaaaaaatcaaagattttgcgatcgcaatcttgtaataaactatatcttgtggtattatcatttggtgagcattgataacagttattaatactgattgttgaaaaaacgaaataaaatgataaaactttggagaatggcgggaaaagaaatggatatcagaaaaagaaacggtcagccggaagcatacgagtgcggaaagataaagagtgccatcctgtgtgcatttgccagtgtgaatcaggagcctggaagggagcggatggacaggatcatgagcctggtggaagagaaggtggagggcgcggtgaaggatgggagtcctctcagcgtagaacagattcaggacatggtggagcagtctctgatggaagccggatgctacgaggcgcttaagagtttcatcctttatcggaatgagcggagtaaggagcgcggtgtgagacaggatctggtccggtattttcctgatgttcccgatatggaagccgttttaaaggagattcagaaaaagtggaccggcactgcatatcggctggagcacctgtttatgaagttttcagccttctataaacaggggatgacggaggcggagaagctgtccgccttaattcaggccgccgtggaactgaccactcaggaagcgccggactgggagtatattgcagcccgccttttaatggtccgcttcaggaagaaattaagatccatggaggcgaagtatcagatcagcagcttttacgataagctgtattttctgacttccgggcagctttacggcgactatattctggagcattataccagggaagagatcgagacgtgtgagggctttctggatggcacacgggatcagctgtttacgtattccggtctggagctgctgctctcccgatatgtgatccgcagccgggagaatgtcccgttagaatccccccaggaaatgtttctgggcatcgccctgcatctggccatgctggaaaagaacgaccgtctggaatgggtgagacgtttttacgatatgctgagcacgcttaaggttaccatggcgacaccaaccctttccaacgcgagaaagccgtaccatcagctgtcctcctgctttatcgacacggttccggacagtctggacgggatttaccgcagtattgacagctttgcaaaggtcagcaagttcggcggcggcatggggctgtatttcggtaaagtcagagccgcgggaagtgcgattcggggcttcaaaggcgcggccggaggtgtgatacgctggatcaaactggcgaatgatactgcggtggcggtggaccagctgggcgtgcgccagggggcagtcgccgtatatctggatgcatggcataaggatcttccggaattcctggcactgcgcaccaacaatggagacgatcgtatgaaggcgcatgacgtatttccggcagtctgctatccgaacctgttctggaagctggcaaaggaggagatcgatgcggactggtacctgatgtgtccccatgagatccttacggtaaagggctattcactggaagattcctatggaagggaatgggaggaacggtactgggaatgtgttgccgaccacaggattcataagcgcgtgattccggtgaaagaactggtccgcctgattttaaagagtgcggtggagacgggaaccccgtttacctttaacagggatctggtcaatgaggcgaatccaaacagccataagggaatcatttactgcagcaatctctgcacggagattgcacagaatatgagcccggtggagcaggtggagcagcgcatcgagacagtagacggcgagacagtggtagtgaccgtgacgaaaccgggggattttgtggtatgtaatctggccagcctttccctgggcaagatcgacgtgacaaaccgggaagaggtcaccagactgacacagtatgcggtgcgtgcgctggataacgtaatcgatttaaactttttccctgtgccgtatgccaggattaacaacatgaagtaccggcccattggccttggcgtcagcggttaccatcatatgctggctaaaaacggaatttcctgggaatccgaggaacatctggcatttactgaccgggtatttgagtggattaattacgcggcaattgaggccagctgtgataatgcacgggaaaaggggtgctacgaactgtttgaagggagcgactggcagacgggcgcctacttcgagaagcggaagtatcattcggaagaatggctccggctgaaggagaagacagcggcaaacggtatgagaaacggctggctgatcgccatagcgccgaccagcagcaccagcatgctggcgggtacgacggcaggtctggatccgatcatgaaccgctattatctggaagaaaagaaaaacgggctggtgcccagagtggctccggatttgtctcccgaaacattctggcagtacaagaacgcccattatattgaccagcagtggtccgtccgcgcgggaggaatcagacagcgccatgtggaccaggcgcagagcatgaacctctacatcaccaacgaatataccttaaggcaggtgctgaatctttacattctggcctgggagtgcggggtaaaaacgatttactatatccgctccagaagcctggaggtagaagagtgtgaggtatgctccagttaaatacagcagactgtaaaagaggaaaggaaagatcatggaacaattaatcagaaagccgttattcaatccggacggcgataccgatgtcagaaaccgccgcatgatcggcggcaatacaacgaatctcaacgattttaataatatgaaatacacctgggtaagcgactggtaccggcaggccatgaacaatttctgggtaccggaggagatcaacctggggcctgacgtgaaggattaccccatgctggacgcgggggaacggagagcctacgacaagattctgtcattcctcgtattcctggacagcattcagaccgccaatttaccggccatcggcgaatatattacggccaatgaaattaacttatgcctgtccatccagaccttccaggaggccgtccacagccagagctacagctacatgctggacacgatctgcgagccgcagaccaggaatgaggtactctaccagtggaaaaatgatgaacacctgcttaccagaaatacctttatcgggaatctctataacgaattccagaaggacaagagtcccttcacattcatgaagaccgtggtagccaatttcattctggaaggagtttacttctacagcgggttcatgttcttctataaccttggcaggaaccataagatgccggggtccgcacaggagatccggtatatcaaccgggatgagaatactcatttatggctgttccgcaacatgattctggaactgaaaaatgaggagccggagctctttatccccgatcgggtggatgtttacagagagatgattaaggagggctgccgccaggagatcgcctggggccattacgccatcggagacaaggtaccgggactgacgaaagacatgataacggattatattcagtatcttggcaacctgcggtgtatgagccttggctttgaaccgatttatgagggacatgaaaaggaaccggaaagtatggcctgggtatcccagtacagcaatgccaatatgataaagacggatttctttgaggccagaagtacggcttatgcgaaaagcagcgctctggtagatgatctttaaatccggcagatgaccatgaaaagaagcgggcatgaggacagttttagaaaactgtcttcatgcccgcgatgtcatccatggtcatggccctggaaatccggtcaaaatcctgttgaatccgggcgtaaatatcaagaatcggctggcactggattctggtcgcttccatgatctcatcatagtcggaaatcatgagctccacgatatcggcgtcgatcaggccgtcgtccttcatctctgtaataatggagcagattctatctttggaaaacgcggtcttgtagctcctggtaccggaaagcgcgctgataatatcggcaatcgccacgatccgttctccggtgtttaagtcagcggcggtcaggcctctcggataaccggagccgtcgagcttttcgtgatgacggagggcaagatatttgaccgtctcctcgatcacatccccgaatatcttttctgtgatgtccacgtgggtgcgcatgatattcatggcctgcggacttaatttccccggatactccaggatttccaccggaattccgatctttcccaggtcatgaagcatggaaccgcagacgacctgattgcattccttttcgctcagccccatgcgctttgccagttccgagctgatggttgtggtggtgatggtgtgagtaacggtgtggcggctgcggaaatcaatggtgaagatgagcatctttaagtaatccgtgatctcatcctgggtaagcggtatctcggaaagcatctggaaaaatacagcttccgcgtcgttatttccctcaaacggagtgtggaaatcacaggctgcagcgagatctgtgattacgggcgcgaaatttgtgccgctgtccttttttaagagagccagggtctcctcccaggtcaggtgctgtacctccatggccacgtcaatgcggtcggctgcgtggagaacctgtgcaagaagccggatttcctccggaaacgcctccaaattctccaggacctgccaggctgcgtgatgcagaagaatggctccggcaagctttttaagcggggaaaagtatttgatgaacagatagccatagacggagtgggccaaaacgtcatcggtgtcaaactgaagcattttggaaatttcgtcggtcttataggcgccgatatcgtgaagaagggccagaaaacagacgtcccgtattttgcgggcgtcatcgtgaaaatatggtttcagcatctctgatacgatataggccactctgtagccgtgattcatcaggcgggcgtccacatagctgcaggaacggcggatgatttccagtattccacggttgtcgatgggatctgtatactgcataattgttctcccctggtttcgttgtagtaattatgagtataagtgtagcatagttttggaaaaaagtcatgcgaatgattgccgacgggaagaatcagttgtagaatagaagggaaagaactgcctgggctctttttgaaaaatatggaaatcgccgggagaacggcgggaaagtagagggagttatatgctgacaagtaatttaaatgtggtggagaagtacgactatctggctgagaaattccgcaagggctatgaatttttacggacggcggatttgaaggcactgcctgttggaagagtggatattgaaggcgacgacatttacgccagtgttcaggaatacacttctctgaaggcggatacgtgcaagtttgaggcccacaaccggtatttcgacattcagtatgtggtggaaggggaggaacagttcggctatgcgaaacgagaggatctgacggaagatgctccttacgatgagacgaatgacatcatatttttccgtgaacccgaggaagcgggaacggtcctgctgaaggctggggactgtattgttgtggctcctgaggacgcccataagccgagatgccaggcaaaagaggcatgcagggtaaagaaagtggtcattaaggtcagagtataggaatgtgacgccggaaagagcggaacgcctggggctggggccgccggaagggagtttgaggtggagggtgtgaaatggggaccgtctggccggtatgcctggccggcggggacttgcaggacggagaacaggaatgtggaaaagggactgccgtatcatggggaaacccgcagtacggcagcagtgggaaagacggaacatgcagcaggagccggagacacagcagcggaggggctgcggcccggagctctggatacggtggaattcggctctgcaggcagcggggcggtttcggaagaagcggtgatggactgtctgcgcatcctcgaacgggattatccgggaatgaacgttgtgatttgggaacgggagggtgcggccgacttggcacagctggcggctgcgctgggaaaaggacggtttctggttgttaccagggattttctggatcggatgggacgggatgccggagagtatgagcgctgcaggactgtccttaaggagacggcgtgcaggctggcacagggcggaagtggcagcgtgagtgaaggtgtctgtctcgatgcgtcgggcaaaaggacatgggtggtaccggcagcaggaaaacaggattccggtccgaagaagacaacaccgggagagacgggattgcccggaagtccgggaaaacaaagctgggaatcggaatggaatctgagaaaaacttcggcagcttcctacgctgtcagcggtcactacgggagtcttgccagggcgggcaccagaggccaggtacagaaggtgctgggagatgttcaccggagtatcgggaatttaaggctggcggcctgttttggagatgatgaggagcggatgaaagcaggcagggcgatccgttctctccagaagcttctggcacggggaaacaggaaaatcaggcgtctggaccgggagagcagcctgaagcggcaaaagaagcacgcggagaaggcacggaaggaaaaaaaggtgctgcagatcaggctggagatgaagaagagccggtccgcccggtatggggccgactaccgtctggtgcgggagggacttgcggatacctgctggattttgggagccgcaaggcatcggacccgggaagaaatgcgggcgaaacaggcgcttccgggcgaggccggcatcggagatggactgggctttacagggcttgacggaggcggagagggttcctttcacgcgtctgacgtagtgatatcggatggaggttcggattgagcattgactaagatgtacgtatatgttaaaatacatacaggagttatatggtcttgattcgaataaagcgaggtcacccatggagagtaaatacaaacatctttacaatcagttacaggatcagattgaaaaacgggaatataaggcgggggacaagcttccctcagaaggcgatttgatggaattatacggcgcatcccgcgatacggtgagaaaggcgctggacttactggtgcaggacggatttatcagaaaggcaaaggggaagccggcagttgtactggataagaacaaatttaattttccggtatccgagatcgccagttttaaggagatataccgcttctctgattcaaagccgagaacgtacgtggaaaatttagagattgttaaaaatgacccgaagctgatggaggccttacagatcggcccggaggatgaggcgtttgttctggaacgggtcagggaaatagaaggggaaaagattattatcgataaggattttttctccagaaaagtagtggaaaatcttccgctccgggcggcccaggattctgtctatgagtatctggagcatgaggtgggcttaaagatcggtttcgccatgaaagagatcacggtacagatggcgggagatgaggaccgccgccttctggatatgaagaattatgacatgatcgttgtggtgaagagttatacgtatctggaagattccacactgttccagtttacagagtcccgccatcgcccggacaagtttaagtttgtggactttgcgaggcggaagctgtaggtggagcgtgccgcggcgcctgtgtgagtgccggatcgtgaaacaaaccatggtatacgtacaagaatgacaaaatcccgaaaaccagcagataagaaatgaattttactgggaatcgggattttttgtttttatttttccaaacatgttgacaaacatatacgtatatgttatattgaattcacaagataaacatacaagaagagaaaaataaaaaacgtgtatgaaaaggagaatggttatggggaagtattcggatgacgcaaagaagcttctggactatgtcggcgggaaacagaatattacggcagtgacacactgtatgacgagaatgcgttttgttctggccgacccggagaaggctgatgtggcaaagatcgaagcgcttaagagcgtaaaggggacttttacacaggcaggacagtttcaggtgattattggaaatgatgtttccgtgttttacaatgagtttacctctgtatccggtatcgaaggagtttccaaggaggaagtaaagcaggaagcaaaaggaaacatgaatccggttcagaaggcggtagccaatatcgcggagattttcgcaccccttattcctgccattatcgtcggcggtctgattctgggattccggaatatcatcggagagattcggtttatgaacggcgggacagagacgctgattgaggtgtctcagttctgggcgggagtacacagctttctctggctgatcggtgaggcgatcttccatttcctgccggtgggtatcacatggtccgtgacgaagaagatgggaacgactcagattctgggaattgttctcggtctgaccctggtttccccgcagctgttaaatgcgtatgccatggcacccggcgtggaggttccggtctgggattttggattctttaccatgcagatggttggctatcaggcgcaggtgataccggcgatactggccggattcgtcctggtttatttagaaaaatttttcaagaagattacgcctcaggcgatttccatgatcgtggtgccgttcttatctctggttctggctgtgatcgcggctcacgcagttttgggacctgtgggctgggctgtgggctcctgggtatccagggtggtttacgcgggacttacctcaagcttccgctggttatttgcaaccgtattcggttttatctacgcaccgcttgtgatcaccggccttcatcacatgaccaatgccatcgatttgtagctgatggcggaatttggcggcacgatgctgtggccgatgatcgctttatccaatatcgcacagggatccgcagtactgggtatgatctgtttgcagaagcataatgaggaggcgaagcagatttccattccggcctgcatctcctgctatctgggcgtgacggaaccggcaatcttcggtgtcaacttaaagaggggatttccgtttatctccgccatgatcggttccgccattgcggcgacggtatccgtgggaagcaacgtgatggccaattccatcggtgtgggcggaattccgggaattttgtcgattcagccgcagtacatgggaagatttgcggtctgcatgcttattaccattgtggttccgtttatgctgacggttgtcattggaaagaaaaaagacgttcggtaagatgctggaggagaatatgaaagactttaaaaaatcgtgtgtatatcagatttatccaaagtccttccgggatacgaccggaaacggagtcggtgacttaaacggagtgacggagaagctggactatttgaagaagcttggagttgattatctgtggctcacccccttcttcgtatcaccacagaatgacaacggatatgatattgcagactactaccacattgacccgctgttcggcaccatggaggatttagaccgcctcatcaaagaggcggccgacaggggaatgggcctgatgtttgacatggtgtttaaccatacttccacccatcaccagtggtttgcgcgggctcttaagggagagaaggagtaccaggattactacattttccggaaagggaaaaagggggtcccccctaccaactggcagtccaagttcggcggcagtgcctgggagtatgtggaggagctgggacagtattaccttcacttatttgaccggacgcaggcggatttaaactgggagaatcccagggttcgggaggaaatccgcagagtgctcctttactggaagaaaaagggaatccgcggttttcggtttgatgtgatcaatctgatctccaagcctgcgtattttgaggacgacgatgagggagacggccgcagattttatacagacggccccagggtccatgagtatttgaaggagatggtaaaggagaccggcctgtatgaggatgatatcatcaccgttggggagatgtcttccaccacaatccatcattgtattcagtatacaaacccgcaggagcagcagctcaagatgtgttttaatttccaccacctgaaggtggactataaaaatggggacaaatggtcactgatgccctgcgatttcatgggcctgaaaaagatatttcacacctggcagagcggtatggcagaaggcggcggctggaatgccgtattctggtgtaaccatgaccagccgagggccgtatcgcggtttggagatgatacgaaataccggaaacagtcggccaagatgctggcgacggctattcacggcatgagagggacgccgtatatttatcagggggaggaactcggcatgaccaatgccggttttacctccgtcagccagtaccgtgatgtggaaagcctgcattatttcgatattttgaaggagagcggtatagacgaagccgaggtctgcgagattctgcgacagcgttccagagacaacagccgtacccccatgcagtggagtgatggtgtaaatgccggctttaccagcgctgtgccctggatcgaagtcaaccggaaccatacaacaatcaatgcagaggaatgcctggaggacagtgattccattttctattattatcagaaactgattcgtttaaggaaagagtatgatgtcatcagcgaaggcggttatgaaccgattctggaagatcacgaggcggtatttgcctacaaaaggatatacggcggggaaacgctgatcgtactgaccaatttcaccgacacatgccagttcatagaggcggcggatataaagctttcggaagaagaactgacggaatacaaaaccctgatcgcaaatgctgggctcctgcggagtgcggcaggaatccgccttgctccatatggtgcagtcatgctgatcagggagccctaaattcccaacgtatgctccagaagtattttcactcccataatcaccaggattaaccctcctgcgaattctgccttggacttgtatttcgtaccgaagacattgccgaccttgacaccgatgatggagaggatgaaggtggtggagccgataaaggagacagccgggacgatgcgtacctgaaggaaggcgaaggtgacgccgacggccagggcgtcgatgctggttgcgatggcaagcaggatcatattgcccggtgatacggagcagtccacgcattcctcttcctgattcagagactcgcgaatcatattaaatccgatgatgcccagaagaataaatgcgatccagtggtcgatggacgtgatggcatttttaaactgggatcccagtatgtaaccaataagcggcatacccgcctgaaagcctccgaaatagagtccgacaatgactgcatttttccagctcatcttctgcatggaaagccccttgcagattgaaacagcgaaggcgtccatagaaaggcccaccgcgatgatgaacagctcaattaatgacatgtgatattcctcctgcgtataagcttaattagtatatgatgcggggaacaaaaaaagacttatctgcaggcggcaaaaagcccgcagataagtctcatcttttttgcgtaaaagcaagtcaagcaggaccagatagacgaacgctatcagtatgttgaccctgctgcacaccgcattccaacgaatgtgaggggacttccctcatccctgacccgtgggaggcgtgctgattactccctcatcttccgtttattctactggattttatgggggatgtcaagcgaaaaaccatctgtttttattccagcggctgtatgtagaaattgcccacgacatcgctggagtttatgacgttgacgaaggtgtcggggtactgctcgcggatgcgctttttcatcttttttacgtcgctgtcggagaggactgtataaagaagatactttttgttggccgagtaggaaccgaatcccttcaggatggtgctgctgtggttggtcagctccattaaatcggccgacacagccgccggattgtccgtgacgatgagcagcgtctttttcttgtattttttataaagtgtgttgatcacctgcgtgttgcagaactgatagatgatggagtacagtgcgatgtccatgccgaagatggctccggaaatgaggatgataacagcactgaacagcagcatgtagttgaaggtggaaatcttatatttggccgacagggacatggcgatgaaatccgttccgcctccgctggcccggttgtttaagataaggctcatgcccagaccgttgatgatcccgccgaatacggagatgagaagaaggtctccggtgatggggatcacgggcagctggtcaaccagaatggatacggttaagaggctcacacaggataaaatcgtaaattttttcccgacaatgcggtaggcaaagacggcagggatggcgttgaaaaccacgttcaagaaggtgaaggagatcttcacgccaaaaaaggccagccccaccctctgaatcagcttggcgagtccggaaaaaccgcccggaaccagcttcccctgttccacgaaggtgttgagattcactgctacgataacacttccgaataggatgaagaagagggagactgcgtcgcgaagccgcttatcctttcctgccttttcggcgttctttttgtataaatcggaaactccctgtttttctgccatttggaccctccctttttccggataccggatcaataagttatctttcataatgccatataagcggatgctaccatttcccacaaaaatcctgtataatgaaacacagaggcaataatccattttaatgattataccatatatttaacagaaggggcatgagattatgaaacaattgccgcattttaacagtattagaaaaaaagtcatttttttagatctgatatttgtttttccattgttcgtactgttttgtattcttatgagttatgtgtttgaagacagcaattataaattgaataacagtaaattgagccttctggaggagaaatgcagtaatattgcaaatcgaaatacagagatcattaaaatttctgtagggatgtatttggaccagaatattaaccggctgatctcgaagaaaaataaactgactggctatgagtatatcagtgcgcaggacagtatacagagcaagatgctggaattaacagagctgtttcccgacagacagtatcaggtgatgctgctctgcgaaaatggaatgaacttttttcaatcgtctctaaactttacccaggatatgattacactcaaaatgctggatcaggagagctggtatcaggaagccatggaaaaggatgattccgtctatttccttccaaagtacaggagtcctgcactgcaaaaattatttcgggaagatacgctgtttgccgttcaaaagatgcgtaatttaaacagcggcagaaatgtcggcatcatgattgtcgccatctcccgtgatatctggggaaatgttattctcagtgacgaggattccgatgtaaataccatggtcatcgatcagtacagaaagattatcttttcttctgatcctcaaatgtatgggtatgaagtagagaacaattcatactatgatcagatcgcaaattattcaaaaggtttttttctgggtaatgtaaagaagcaatactgtcacatacgttttgccagtattgagggggtaggctggaagctgatttcttatgaaccgtatcagcatggctggtcctccttctatgtgattctgtttcttgtattgggagcggcaatgttcagcgtcctggtgataattgttttttacaactgcagctttatttcgagaaggatggaaaaactaaacaaaaatattctggaggtatcgaatggggatttaaagacaaggattcaggaggactatgaagtagagttccatgaaatctgccacaattttaattatatgctggaccatattgaaaatcttatgaagcagttggaaaaggaggaggaagaaaagcatgccctggaaattcaggcattgcaggcacagattaatcctcatttctttcacaatacactggttacaatccgcttcatgattcagatggaagagtataatgaagcggacagagcgctgctggctttttcaaaattactgagaaaatcttttgtgaattcacagaagatcattcccatcagggaagagcttgccatggtggaggattacctggaattaatgaaactccgttatcgcgataaattccagtggaaaattcttgctgcagaagatgtgatggaactgggaattctgaagaacgtaatccagcctctggttgaaaacagttttaatatgaaggatgacatgggacatatcgtcatatgcgcatatcgaataaaggaaagcgtcatcattgaagtggaagacgatggtgtgggagtagatttggagaagataaacaacagtatacataatcagcagactgtaaaagcaagagatcaactgaatggaatcgggctttccaatatacaaatgaggattttacgaaacttcggcagtcaatatggactgagtgtagaggtaaattcatcaggaggcgttacctttcgaatgaatatacctgtgattcaaatggaggggggaaacagttgaatatcgtaatcgcagatgatgaagagattattttgaaatggatgaaaaagaatattgaagcactgtcgccggaaaatcatgtgattgcttcctgtataaatggaatgcaggtattgaactgctgcctgaatggttcggttgatgtgctgtttactgatatccgtatgccggttatggatgggatggaattgcttaagaagctgaatcagaatcatgttttgccttatacggttgttttaagtgcttatgatgatttttcctatgcaagggactgtctgaaactgggggtaagtgagttcctgctaaagtcggagattacgaaggatgagctggaaaagtgtctgcagactgcaaaggaaagaataaaaaataacgggaaggctgagcaaaagcaatcctctccggaggaagagctggaaaaagttttgctgcagtatttgaaagaaccggactatatctccagagatgccgtgagacaggtttggaataactgctgcgggatcaggggaaagtatgcggtattcctgattcgcgataccgatagaatatcgaacccggatcaactgaaggaaatcctgccaattgcttttccggatgagaaatgggtgcagtattgtctgtctgtgaatgaacgggagacggtcgtccttgcggaaatgatcgacggcgatctccaaaaattcacggagaatctatatgagacaatcgcctcctttggagggattaatatgtatatcagcagttccgatgccggtaaaacgctagaagagctggagggattgtatgaccattcgcgggataccctggcatatcagctgttttatcaacacattggcggcctcaattatgaaactatgaaaaaacggattggccgtatagaagtgctcctggaagagatgtttgaaaaacttgaattactgataaacagccgtaagtggaatcttatcctggaagagatgaatcaaatattcgattacgccagaaagtcggagccagagccggtcggtatgaaaaggctgtttttaaacagtttactgaatctgtactggagctgtctggaagaagcagacaggagatcattttcgatcgacaagattatcgaagtgacgaattgtacggatattgaccagcttgaaaatatggtttcgatacaggcggaagagatcatcaggctgttaatcgggaaacaaaagaaatacagtgattctgtttttaagattatgcagtatatggaagcgcgatacgcggaacctgttacccttgatgaactggccaatcatgtccatatgaaccggagttatatttctcatctgtttaaaaaagaaacaggcagaaatattaatgcttatttattagaatttcgaatggaaaaagcaaaaattcttctggagagcagcaaccataatatccaggatatatgctgccagatagggataccggattccgcctactttagtaaagtatttaaaaaatataccggttttaccccgatcgaattcagacgcatcagcaataagaactgatgcgtcttttatttatagtaaaatctgcagatgagatttacccttttaacaacaaactgataagacaaaaatgccaaataaattacaaaaaaaacaaaataattttaaaattaacgaacgttttccaaagaaaaacaaaatgtattataaaaataatacaaaataataaataaaaaccagaaataaatatacatagtacatagtaaaagaactgggaaacagtataatatagttatcaagttcctggagtacaacgaccataaacaaaaggagaggtaagtaatgaaaagaaatttgaaagctgttttaagtacagtagcagccggttgtatggtgctgtctttaactgcctgcggcagtggtaatgaagatctggtttctgatgcgggaaaggataccggtgatgaaaatgtaaaactggtttttctcagggcaggaacagaggattataagaaggatgcgtttactcagatgattgaaggctttgaagcaaagtatccgaattatacggtagagtatcaggaagctccctggggagacgattttgagacgaagctgaataccggctttgcttccgggactgctccggacgtaatccattactctctggcatccattggtgcaagagttcccatgggacagtatgaatgccttgacccgtatacagaaggatgggaaggtatggatgatatgtatgacagcgtaaaagaagccggaagtattggcggcaaactttatggtgttccatacactccggatgcaagaatgtttgttatcaatacagaattatttgaaaaggccgggctcgatcctgattcaccgccttcaaactgggatgaacttctggaagcccataagaaacttgtggtaaaagatgattccggcaatgtaatacagtgtggttttggagttcccaccagcggaagaaatattaatcaatacctggaaatattccttgttcagaatggcctgggcaatcttgtggatgaggcaagtaatgaaatcctgtttaataagccggaggcagtagaagccatggatttcttaagacagttaaaggaggcaggactggtagactggaataacacccagcaggaccagaatccattttataatggaaccgcggccatgacagtagtttctgaaaatgagtttaataatatcaataccggggatttagaaggaaaaattaaaatggttccaatgttttccaaagtaaacagcggtaccttctgtgggatgcattttatgtttatgaatgcgaactcaaaacataaagaggcggcctggaaactgatcgaatacatgagcagcaaggagtccatgcagatctggatggatacggcgaaaacagctccggtaagggcttctttggaggaggcttacttgaaaaagaatccggtgaacggcccaatgattatggaagcgattgaaattgggaaaggatcgcccaaagttccgtactttaacagcgtatttacctatgtagacgatgcgatggaacaggtattctatgggcagtcatctccccaggacgcgttaaacgcagctgcagaaaaggtacaggaggaaattgataatcaataactgtggcaatgcggtctgtttggtataaatagaccgcattatttattcgcgtgtacagcgggctggagaggcggttttcgagaggcagccgtggcctgtatcaaatagaaatgaggagagaggaaagatggccggaaagaaagtacgaagtaaaacgcacagcgataaagaggcatatattatgattctgcctgcttacctgatttttaccatatttattctgataccaatcggaatggtattatattatagtttgaccgattttaacatgtaccagattcccgaatttttaggattgaaaaattatatgaagctgtttcatgattcggaatttcttacatctgttggaaatacgctgctgtatacggtggtaaccctgacaatacaaatggcattggggctcttattagcagtactgctttatcgggagtccagagccgtcccttttttccgcacggccctttacatgccaaacattatgtccatggtatgtgtgtctatggtgtggctgtggctgtataatcccaattttggaatcctcaacagttttttaagactgatcggtataccggcccagcagtggcttattaatccgaatcaggcaatgctgtgtatcattataataggaatctggaaaaactgcggatattcgatggtcatcttcctgggaggcctgaccggaatcccgcaatctttatatgaagctgcagagctggatggcgcaggtgctttttataaatttctctatatcacatggccaatgctgtaccccactacctttttcctgcttgtaacaggaatcgtaaacagttttgccgtgtttgaacaggttaatattatgacaaacggaggacccttaaatagaacgactacgattgtccaccaaatttacaggagaggatttctggaattcaagatggggtacgcaagtgctatggcggtgctgctgctggtgttttctttattcgttacaatgatggtctttaaatttggcaataaaggtcaggatgtggatgtatcttaggaggaacaaacatgaaaaagaaaaaaagaaatcatatcatctggatcgtttgcatgacggttgtttctgcgattattctgcttccgattattgtgatgattttgacgtcgtttaagacgaccggagagattaattcggcggtgttccatttccttccggattctcttaattttgataattataaaactgccatgtctaccggaaactggctgatctattttagaaattctttaatcattactctggtcagcatcgtattttcgctgctgtttaattccattgcgggatatgcgtttgccagactgcattttaaagggtcaaaggtgctttttacgctgttgctggttggtcttatgatgccgcctcaggtgacgatgctgccaacgtttctgattatggcaagatttccaatgataggcggaaatgatattctgggatttggcggttcaggtctgatgaacacctttcccggcgtaattattcccctggtatccggctcctttggtgtctttttgtcaaagcagttttacgagaattttccaaaatcactggatgaagcagccatgctggacggggcgggcaagtggaagacatacttttatatctatctccccaattcaaaggttattcttgcgaccttggcactgttaaaagggtcagcagtctggaatgattatttatggcctctggtcatgacaaattcagtaaatatgaggaccgtacagctggcgcttacgatgttcagagatgaaagtaccgtgcgctggggacctatgatggctgcggcaacgttaatttctctcccgatgattctgttatttttatgtgcccagaagtattttgtacagggagtcgtttctactggattaaagtagacggcagagaggagaactgcagtggaaagacctaatattattgtttatttttcagatcagcagcgttgggataccttaggctgctatggccagcatctgaatgtaacccctaaccttgacagtcttgcaaaggaaggcgttatatttgagaatgcatttacctgtcagccggtttgcgggcctgcacgggcctgcctgcagagcggaaaatatgcgacccaggtgaactgccatagaaatgcgctggccctgccgcagaatataaagaccctggcagattattttaatgaatccggttatgagacggcttacgtcggcaaatggcatctggcctcaaacagaagcagttatacggctccgtttgatgaagaaaactacgagaccagggcgattccgccggaacgcaggggcgggtatcgggattattggatggcggccgatgttttagaggcgacctcccatggatacgacggatatgtgtttgatgatgaaggaaaaaaatgcgagtttatcggttaccgtgcggatgcaataaacaactatgcggtacattacctccaccagtatgacggggagaaaccattttttctgtttatttctcaaatcgagcctcatcaccagaatgatcatggccgttttgaggcgccggatggcgcgcgtgagaagtttaccggctatgagctgccggctgacattcctgtggacaggggggattggaaggaacattatccggactatttagggcagtgccacagcctggatgaaaatgtcggacggctggtcgaaacgctgaaggcgaggggattgtgggagaacacgatcctgttttacacatcggaccatggctgccatttttgcacaaggaacagcgagtataagcgctcctgccatgaggcgagcatccatattccgctgcttgcagtgggcgggccatttaaaggcggaaaaacaatttcagaactggttagcctgattgatttaccggtgacgctgctggactgtgcagggatcgaaaaaccggaggattttcagggaaattcgctgaaatcccttgccgatggaacatcggaaggctgggaggactgtgtgtttatacagatcagtgaaagcggggtcggcagagcaatccggacagatcggtggaaatactcaatcgctgcagatgcggatggctggaactgcccgggtgcagatgtctattatgaacagtacctgtttgatttagagcacgatccggctgaacaatacaatctggcgggagaccctgactgtggaacgacaaggagaatgctgcgtgagaagctcctgttttgtatggaacgggcaggggagaagagaccggtaattcgtccttttcgagaggactgaaagggggaactggtatgaaagcaattatgatcatgtttgattcattaaaccgcagatttcttgaaccgtatggctgtcgggagacaatcactccgaatttcctcagattggcacagaaaaccgtgcagtttgagaacagctacgccggaagtctgccctgtattcccgcaaggagagaactgcacacgggacggtataattttttgcaccggtcctggggacctctggagccttttgatgattccatgccggggattctgcgggagcatgggatccacagccatctggtcagcgatcacggccattattgggaatgcggaggtgcaacgtatcacactcaatataccacatgggaaaatatacggggacaggagggcgatccctgggctcccgtggttggaggcgcagaggatacggacccgaattttgccgtatttacagaagggctgcgcagcgaactgtacaggcagaacctggcgaaccggacaagagtgaccgaaaaagaccagtacccattggtgaagaccttcgaccagggacttgaatttttgagagaaaatgaagggaaggattctttctttttacagatagagtcgttttcacctcatgagccttttatggcgggcagggagtttaaagagatgtatcccgggaaggtaaaagggaaaaagtatgagtggccggattatggaccggtcacggaagctcctgatgaaatcgaggaggtacgttactcttattttgctgatctgacaatgtgtgatgagcagttaggccgtctgctggattacatggatgaaaagaatctgtgggaagacacgatggttatcgtcaataccgatcatggatacatgctgggagagcacgggtattgggcgaagaactatatgctgtgctacgatgagattgtccatacgccgctgttcatctgggatccaagattccctgaatctgccggaacgagcaggacagcgcttgtgcagaccatagatctgccggttacgattctgaagtttttcggtatcgatcctgccgaagatatgcaggggcaggatatagcgcagattataggggaagataaaggcagccgttcatgcggattgtttggtatatttggggcgcatatatgctgtacggatggaagatacgtatatatgagggctccgagaaatttagagattccccttcatgagtatacattaatgccaacacatatgatggacttcttttcaccgagggaattagaatctatggaacgtcatgaagccttttcctttacaaaaaattgtcctgtcatgcagattgatacggataaggcgatccggtgtattgaggaaggagactatctgtttgatttatggaatgatccggggcagaagcatccgattgtatcggaagaaatagtgggaaaaatggagcagagcatggttcggcttatgaggctcaacgatgctccggaggaactgtatctgcgatttggttttgcctgaaagaggaacctgctgagagaaggctgtgatcaataatggagaaagaatccctggctcgaagaaattcggccagggattcttctgcggctataatattatttatgtaaacggtgtaataatttataacatttcccataatttattcctatttatttccgccctctattcccctataataaaaccatcagaaatacctgcgcaggttcaaatagaatgatgctactataaggaggaggacttatactatgaggaaaagtatctgtaaagcggcagccctgattcttgccggaacaatgtgcgcgggcctaacagcctgcggtggaaagactcaggaaacaaaggtccaggagacggcggttcaggatacaaaggaggcgcagaccggagaaacaggaaaggaacaggcttcggaagcggggaaagagagtgccgcgccaaagaagaaggtatcactggttcttgcaacaaactggggtgagggggactccaagtatcactatttctatccgaagtttcaggaatttcaggaagcgaatgccgatacgatggatattactctggagacttacagcacagaagactataagacaaagattaagacacagacagcttccggtgatctgccggatgtgtttacctattggggcggtgcgatgatgaccgatatggtggaagcgggactgctgctcgatgtggaagagtactttaacgcgtcggatcaggtaaagagagacggatttgaaccgacctccttcggatattatacggcttccgacggaaagacctacggaatcccgattgaatctaccagggggattttcctggctaataaacagctgtttgaagagaacggtctggacattccaaagacttatgaggagcttttaaagacagcaaagacttttaacgaaaagggcataatcccaatcgcgatcggcagcaacggcggaacaccatctgaattctttttcagtgaactgtacggccagtatgacggggcggcaaaggagctggaggagctggccgcgaccaggaccttcaataccgggaatgcgcttaaggtagcgaacaatataaaggatatgatcgatcagaagatgtttcctgcggatacggtggcaaatgggggatgggctgcgagccttcagctttataccgacaggaaggcagctatgacctatacgtatccatggatgtttgagtccataccggaagagattcaggaagccagtgagatcgtacccttgcccatgctccctgacgcggatatcgatccggccggtatcatgaccggatttacggtatacggatttgaaattaataaggcttcctttgaggatgcggcaaagcatgatgccatggtgaagctctgcgatttcctggcttctgatgaattatccgcagaactgacgaagagcggcatgattccggcaaagaatattgaaattgacatggacagccagaagcttatctttaagaaaatgatggaatatgcccaggataaaaagctgatttccgtccactatacaaccatgcccgatcaggatgccgttaatatgatggattccagcttagacgagttctttatcaaagcgctgacgccgcaggagctgattgacaaagtacaggcggttttggacaagaataataagtaaacggggaaataatggggctgttccgggacgaaaggaacggccccgttttaaggtgatcgcatgaaaagaaaatacttgaaaaaatatcataatctgccggttactgtaatgttcctggcaccggcatttttaatctacacggtctttctgttcctgccgctgattctcacattttggtacagtctgacgacctggaacggcgtttctgcgaaggtctttgcaggacttgccaattacagggagcttgcggcggacagcgactactggctcacattttccaacacggtaaagcttactgtgatctctctcatcatccagattggagcaggaattcttctggcttacctcttatacagctggacgaaggggatgaagatcttccgcaccatctattttcttccggtggttatcgcaccggttgccatcggtttgatgttttccctgttttataacagcgaaatcggtattttcaataaaatcctgactgcggtcggtctggggagatttgcgacgaactggctgtccaatccgcgtacactgttatatgcggtgatggcgccgcaggtatggcagtacataggcctttatgtaaccatatttttaggagcacttcaatcagtaccggaggatttaatcgagagcgcgcagatcgacggagccgggaaattacagtcattcttccacgtcatcctgccgcagatcaccggatttatgaatatctgcatcatcctgtgtctgaccggatcgttgaaggcattcgatcattcctggatcatgaccggaggcgggccgggagtgcgctccgcatatctgggggtattcatgtataaatcagcctttgtgaattctgattttggcctcggaagcgcggtgacgattaccattgtgacggtgtccttaacggttaccatactgtttaactggtttgcagacagaaagaaggggtgaggcttgtggaacgatttttaaaacgatctctgaaatacagggttaccgctgttttgtgctatgccatcatgagcatatcggcggtggcagcgctttacccttttatatgggtggtcttttcctcgctcaaggataacaatgagatttacagcaattccttcggtcttccgaagacggcggtgtggtcaaactacgcggaggcgtggaaaggagccagagtcggccggagttttgtaaacagtattctcgtctgcctgataacgctggcggtgcttaccgtaattacgtccatggccagctatattctcacaagggttacaaagagcagactgctgtccgtgtatttttctctgggaatcatgattccggtgcatgcgctattgattccgtccgtactgatctttaaaaggcttcatctgatcgaccatctgtccggcctgatgatcgtatacacggcggtgaacatctcttttgccatgtttattatgaacgggttcatggaggggatccccagggagctggatgaggcggctacgatcgacgggtgcggtcgggcggaaatcttctttcacattgtgtttccggtagcgaaaccgggaatcgccacggtggctaccatcacatttttaaactgctggaacgatctgcttctggggctggtgctgatctcaacacctgccagaaagacactttccatgacaatctccgcgttgaagggatcttacgtgacacagtacggtctcctctgcgccggtttcgtcatctcgatcgttccggtagtctttatgtatctgctgttccagaaacaggtgatagcgggtatgacagcgggagcagtcaagggttaggcgcgtccggaaaggaagcgccggaggaggaaataacatggtgaaattcacacatgacggaatccggataaacggagtggaaaggcctctgtacagtggctcgatacattactggaggacgaagaagaaggactggcggcttgttctgtcacagatcaggggcatgggttttgagatcgtggaaacgtatattccgtggtcggttcatgaatatgaggaaggaaagtatgattttggagagattgaggaagagaaagatctggacctgtttttaaccctctgcgaggaaatgaacctggccgtcatcgttcgcccagggcctcatatcaatgcagagatgagcggtttcggatatccagagtggattctgatggatgaggagattcaggcgaaaaatccatggggaaccacggttttgtatccctatgccacaggtccctttcctattccttcctatgcaagtgacaagctgtatgagaagacagagatttattttcagaaactgaagccgattctgcagcggcactgcggcggcagcggctgtatctgcctgatccaggcggataacgagacgtgcaacttcttccgggacaggccgtatattatggattactcggactgctcgaaggcacagtatcataaattcctggtggagcgatacggtaccgtggcggccatgaacgagaggtatcacagaaattacagcggatttcaggaaacagaaccgccctgcggctttgaagaaggcgatttttcgtcgctctgctattatctggactgggtagaatttaaggagtatcagattctcgctgctctggggcggctggtggacatcataaaccgcctggagcttccggtaccgattttccataactgcgcatatcagaactatacgcctgtctcggttcagagagatgaggagataccaggccttatggtggctgggatcgatgcctatccggagccgggagatgcggccatgctgaaggagagaattcggtatctggccggcagcagccgttttccgttcgtgccggaatttggttccggctcctggtttgaccgggaaatgcttctgaccgcagaggaagagcggttcggatacctgtattctgtgatgaatggtttaaagggtgtgaatttttatatgctggcggagcgggaccggtggactggctgtcctgtgactaacgacggaagaatcaggaagccgtattatgagatgttctcggatctgctgagactgttgaaagatcatgaaatatatcattttaaccgctctccccgcgtgctgattttaaaaaattacgatatggggaggctgaaggctctccattccgtgatggattgtaatacattctcgtcaaattgttttatcaaggggccggatattccagcggcgttgtttctgccggagggggaaccggaatattatctggacagggaattaaattactgggatgatgcatgggtaaaaggactggcgaagcgcttcgacgaagaacatgaaatctatgattattctgatgaatatctggattatggcagatggctccaatacgatgtgattgcggcggcatcgggggatatcatggatgcgaagacgcaaaagcgcctggcggattttgccggtatgccgggaaagaaggtaattctggggccagtcattccctggtacgacagaaccttaaaagcctgtgaaatactgaaacacatggtggaagagggggaggactccggaattctgtttgcaaaagagccgggagagatcggtgccggtttctgggagcatttaaggcggagcagagaatacggctgtggggatccggagatcgagctggccgttcaccggagagagaatagcagagatcatctgctttatacagccaatctttccggaaaagagaaaacggcatttatttccgttagcgacgagccaaatgaacacattagcgaatccatttggcgactgccgcgaggttcgaaatcaccgctgcagacggcgggggcgttgaatgccagtgcggaaaggcgccgcttttcagtgctgcaggggcctgtgaaaataaacatggagaaaaacggcataactgtacagatccccgcttatactgtggctattttgtatgtggaggagaatgtatgatagacagtggtttaaaagtggaatatttggatccggagctctggactcatctgggagaaatccttcagcctttatccgggcaaggacaggtcctgcatgtcagaaggctgtcttccggtttgtaccgggctgttaagtgcagcagggggacagccgcagtgtatgagagtgaagctggctgcccgtttctcgatctttcccagtatatggaaggagaagaattaaatacggagcggatttttcgggatttttatgatattatggaaatcaggatttatacgctggagggtctgcggcagtgttacgcagaaagccagaaagcggagctgtatcgtctcgatattgacgaggcaatatctaaaatctatggtatcttcgggcatacggctggaatgactgtagtgcggagaaaggaaacgggcgagcgatggtattttgaatcgttgagacggcttttgggggataaagatggagatcatgtatatctgttgtggattacggacaacaggacgctgtattttaactgtattctggagatgaagagggggagactggtgggaatctccacatcggacagatatggcggggaacgagattatgataagattcagggattaatagagaaggaatacaggatgaagccggaagtattctgtatggagctttcggaatatcgcactaacgaaaggatattttggttttaacaacgggggataaggatgagagagaagggaaacaggagttcgctgaaggtgagatttacgcttgccatggtactgatgtcgctgattccggggctgatactggcggtagtttactacaggaatgtgaaggacttctaccaggataagacctggacgtatcaggagaacaccttgaggctgatggaggcgaagatgcaggatatcgtcaagcagagtgaggtggtgctgaaccaggttctgggactttctgttacctccgacctgttttccggctatacagagatgaatgcctatgagcgcttaaacctgatgcgcaatataaacggcacgctgtcgaacatccggattgccaataattccatcgatcacatctatctgctggcgtttgacggaggcgcctattcgtccaatgctggctggaataagcgtgaatatgccgaaaatgactggacgaagattcgggaagaccagccaggcggaagtattaccgtaccaacgcatccggctgcttacaaatacttgaaccccggagcagcggatcctctggtggtcagtatcgtaacgtatttaaaccgatatacgggaaacagcgtcatcgggctggtacagattgatttgagctatgaaaagatcagggaggccatggactgtatggagatggatgacagcgatatggcgtttgtcgtggatgaagaaggacgggtaatctttgcgccgaaggagtccatggcgggacttcctgcggcagacgtttccctgggggcatataatctggcgcagattctatctgcagtcgacggaggcgtggaggaggacggaaacttttccattcatctggactatggaagagacagcggtacgattcgcaaacgccgcgtaggaaacagcggattctcgattattcagatcaacagcggacgaatgcttaagcaggaactggaccggttccgtaaggtatgggcggccgtggtcggtgcctgtatggtgtccgcggctcttctcgcctcaagcctgtcagctggtattgtaaaaccggtcaccagcttaataaggagcatgagccgtgtcagccgcggtgatttttccacaaaagtggagacaccgaaagataaagacttatctgagctggccttaagctttaacaccatggtggctgaggtggataagctgatgcatgaaaatatagtaaaagagagagaacggctgaccatggagcagacagctctcaattcccagatcaattcccattttctgtataataccttaaataccgtgaagtggatggcggtgcgggcggggaatgaggagatcgcgcggatgatagtggccctggtcaatatgttagagtacagttgcaaaaagatcgatatgcccgttttcatcccagaggaaataaaatttatcaaaaactacgtgtgcatccaggaagggcggtgctgtagcagtgttcatataaagtttgatatcgatccgaagctggagaattgcctgatcttaaaaatgctgcttcagccggtggtggaaaatgccatgcagcatggctttggagaggataatattgataaccggatcctgataaccggaaggcttttaggagaccgggtacagtttcaaattcgggacaatggacagggatttctgtatgagggcttcgataagcttaccggtgtagggctctataatattcaggacagaatccggttgaactatggagacaactacggtgtggagctggaaagtaagccgggagagggaactgcagtgacggtggaaataccggtttgccaaaaggcggaggaggcagatggagaagatattaattgttgacgacgagatgttttccagaacagccattgaagacattcttcgggccgaatggagcagtatagaagtcttcagtgccagaggagccgtggaggcgctgagaattttagagagggaagagattgaccttttgatgacggatatcaaaatgtctggtatgaacggcctggaactgctggcagaggtaagaaagcgggggctatctatggaggttatcatactgagcagctataatgagtttgatcttgtgagacaggctatgaagctgggcacgtttgactatttgttcaagcctgccatgcttccgccggatatcatcgaggtggtcaaaaaggcgttgcagaaacagcgggaaaagagcagcagcaggatcgcggaatctgacagaaagaggctttccagagacagagaacagttttttcgggatctcataagcgcggctggaatcggaaggacctggtttgaagagcgggccgccgcgtttggacttccggagccggtgggaaaaaatgtagtcgtggtattccggctgatccggtaccggaaaagcatggcggaaatcttcgaaaatgatgtttccctgcttcgggcttctgtctgcaatgtcatgtccgaggcgctggattccgaaaaggactgccagtttctgtgcaataagtttgatgagtacgtgtggattgtctgggaggcacgggaagatggaagacaggagttttatgaacggctggaagcgctgatccggacagcggcagactttttgagcaggtattacggactggagttttccatcggcatcagccgcagctctgccagcctgtttgactgctgtcagggatacacggaggctgcggacaatggaagggaaagtgaaacggggatattctatgccggtggtccggataccggcagtttgaaacaggagatgcgggctgccctggattatatccgggatcatctgggagataaggatctgtcacttcagacggtggcggatcaggtgggaatcagccggaattatttcagccgaatattcaaggaggttatgggcgtcaatttcatcgactatgtcacccgactccgggtggagaaggccagaagcctgtacattaacacggatatgaaaatctatgagattgcagaactggtgggatattctgactggcattatctctacagtgtttataaaaagcagctgggccattcgatgtcaaaagaaaagaggggaaagaccacataaaacggttctttctcctcttaatctttccctataattccggagcactgccgttaatcgcctgaacctttgagatatcgatatccttgattgaaaaagatacattgaaggaggagtccgtacctgcaaggaaaaaagtggtagtgcccggcttcaaagtgactgtttcctctccgtaagtcttgtcttcggtatccgcaaggagaatcgtctcatcttccggagttcggcaggagagtgtaatatccccggtattttttgtcgatgtgtaggtgagggaaacggattcctcatcagaaacttcaattgtcagaaatgcggcgtcggtgatgttgacgtaggcatctgctttcacgatgatggatcggtccgtatgtgtgacgttcagcgaatgaaagatactggactgggcgttggttggatgattcggatcagcagcacaggcggttattgagagacagaatatcataaggatggtaacgagtgcagtatgcttcatggtaaatccccctttcccggtttttccatttgtctgtattatgagaataacagattgaaaggaaaaaacagagcataattttcttaatattttctaaaagcagctatgatacctggcaggataaacttgtaaacttacaaaattattaagagttgtggttcctcatgaggctgagagagatttcggtgttttcgttccgccagggagccggggccggagcgcttcccccagtttcggctcatggtttcggccggggcatctctaaggccggaaggatacaaaaacaagggtaccgatgacattcatcgagaactcctgaaggacttctcgattcaggtcctctaaaaatctgactttgaggtcagatttttccccttgtttttgcacccttccgacctaagagctgccgacgtcctgcaaaaatagccgaaactgggggaagcgctccggccccggctccctggcgaaacgaaaacaccgaaattccggctaaagttattgacgaaagcaactttttataattttgtaagtttacaagtttatcctggatacgagtcttgttttttatttttttagagctataataaaagagagaagcaatgatctgttttctgtttcggccgtatcacagcggctggatatcaggcgtttctttatgtgaattcaccatgaagaatcatcacggcgtttcagccacaatttctcagtcaattaaaaccgcaattacggaggggaggtctgtctatagtgaaaaataagtttacataaaaatgtgcttttccttgcaactacagataaaaccatttataatggaggtagaaatatgcagcagatcaaactaaacagaaactataaagacagattgttccgactggcctttcaggagaaaaaggatctgctggatttgtataacgccgtaagcggcagacagtatacaaatccggatgatctgatcattaccacgctcgcggatgcgatttatctgggaatgaagaatgatatatcttttctggtatcggatgtgcttaatttatatgagcatcagagcagctttaatcctaatatgcctgttcgcggtctgaattattttgcagacacttaccgggaatacattgacagaaacggctttgacatctatggagaaaagctgatccgtcttccgatgccgcagtatatcgtcttttacaatgggacgaaagaggaaccggatcggatcgaacttcggctttcggacgcatttttgtgtcagaatccggaggaaaagggctgcctcgaatgcagagcgaccatgattaatattaattatggacataataaagagctgatggaccgctgcaggcggctgaaagactacgcggtgtttgtaagccggataaggaataatgagaagagaggcatggctcttgatgaggcggtaaagcaggctgttcattcctgtatcgaagaggggatcctggcggacattctgaaaaagaacagagtggaggtgtgcaatttgattctatatgaatatgatgagcagaggcagctggcaattgcacgggagggtgcgatgaaggcggggagagaagagggccgtgcagcggaacaagtaacgattatccgtaatatggcaggtaaaggacttaatccgtcagcgattgcggacatgctggggctggaggaaggttacgttaaaaaagtgctgtatctgctggcggaagagactggaagaacggatctggagattgccgggattcttttggagcagaggcaggaggggtgaacttccccataggttcagaaatgatcatccccaaaaaagaaagcgggccgcatgggttccgctttcttttttgctgaagagaaactgcaaaggtgtcttctttttaagagatagccgccttcatttctctgacgtactgacagaccggttcaacgcagtcttttccatatttagccaccattcggacaattgcgcttcccacaataacgccgtcggcgtgttcgctcatcttttttgcctgctccggtgtggagattccgaagccaatggcgcagggaatggactgtgcctcttttactaaggaaaccatctctccgatgttggtggtgatctctgttctgactccggtaacacccatggaggaaacacagtagacgaagccttcggcctccttcgcaatggcgtggattctctctttcgatgtgggtgcaatgagagaaatcagatctaatccgtactggcggcagaggggaaggagctcgcctttctcttcaaaaggcatatccgggacaatcaacgcgtcgatgccggtttcagcagctgtgcggatgaatttctcacttccgtagacaaagatcggattgatatacgtcataaatgccagcgggacctctgttttttcgcggatccgcttcaccatatcgaaaatcttatcggtggtagtgccggaggccagcgcccgtatgtctgcctcctgtatgacgataccctcggctaccggatcagagaatgggattccgatttcaattaaatctgcgcctgcctctgccatggcgacgatcagctcttccgtgacggcaagctccggatcaccggcagtgacaaacgggataaatgcttttccatctgcaaatgcatctcttactctactcatagatttctacccccttatatctggcgattgcagccacgtccttgtctccgcggccggagagattgatgacgattacctgatctttccccatggccggagcgatttttctggcataagccactgcgtgggcgctttcgatggccgggatgattccctccattctggataagtactcgaacgcgtctacggcttcggcatcggtgacaggaacgtactgagcccggccggagtcgtgcagggaagcgtgttccggcccgattcccggataatccagccctgcggaaatggagtagaccggagcgatctggccgtattcatcctgacagaaataggatttcatgccatggaagattcccaggcttccggtggcaatggtagcggcattcttatccgtatcgatgccgtgcccggcggcttcacatcccaccagcttcacacccggttcatcaatgaaatcatagaagatccccatggcgttgctgccgccgccgacacaggcgatcagcatatcaggaagtttgccttccgcctccagaagctgggattttacttccctgccgataatgctctggaaatcgcggacgatcgtggggaacgggtgggggcccatgacggaacccagtacatagtgggtatcctccacccggttcgtccactcgcgcagtgtttcgttgactgcatcctttaaggtctgcgtaccgctggtgacgggatgaaccctggcgcctaaaagctccatgcggaacacgtttaaggcctgacggtctgtgtcctcttttcccatgtagacctcacactccagccctaagagtgctgcggcggtagcagttgcaacgccgtgctggcctgcgccggtttcagcgatgacccgggtcttgcccattttcttagcgaggagcgtctgccccagcgcattgttgatcttgtgggaaccggtgtggtttagatcttctctttttaaatagatttttgcgccgcccagatcttcggtcatctttgcagcatagtagagaagagacggtcttcccgtataggtgcggtttaactcatcgagttcggcgagaaatgactcgtcgtggatgtatttttcataggctgtctccagctcatttactgcattcatcagcgtttcggggataaattgtcctccgtgctgtccaaatcttccttttgacatgattaagcactccttactgtttgtatgatttcctggatttttttcgggtctttccgtccgccagtttcggctgcgctgcttaagtcgaggcagcaggcctctgttttcaatgcttcttttatggtggcggcagagagtccgccggccagaaaccacggcttttcgatgtggggaattaaagaccagtcgaaacggaccccacttccgccgtactgatccttgacaaaggtatcaaacagcagatattcggccggataacttacggccctttggatatcgtctctgtcctttacgcgcactgcccggatgaggggaacggaagcggccagccctgtcgcggccagcgccttctttaaattctctgcataccgtgctgtctcaaagccatccatatctccatggagctggactgcgtcgataattccccggctggcgatccgcacaatgtcttctatgggactgttgacaaatacgccaacagccatgatttccggcgacaggagctttttcagcccggcggccctcatctcgctcacgttccgcctgctgggcgcaaagacgaaaccgatgtagtcgggccggtactcatttacggccgcgatatcttccggccgtgtcaggccgcaaatctttatcttcatcattcagactccttctgcatttcttacattactcacacgcctgtttccaggaatcaagaatgagcttcttgctgccggaacgcatcagcgtttcaccgatcagtacgccatccaccccggcgttatggagaagccggatatcctccgctgattttactccgctctccgctataaagagtacgccttccggcacaaggttccttaagcggatggagttggagaaatccacctcaaaggtctttaaattccggttgttgacgccgatgatccgggcgcctgcccggagtgcggatttgatctcctcttcatcgtgtgcttcgaccagtgcgctcattcccaggctgtcgcacaaatgaattccggtgcgaagcgtctctgtgtcgaggagggcgcagatcaacaggactgcggaagccccgatgacctttgcctcgaaaatctggtagggatcaatggtaaaatccttgcgaagcaggggcacagagacgtgccctcggatttccctcagatagtcgctgctgcccagaaaatattcgggttcggtgagaacggagatggcggcggctccggcggcctcgtaatccctggcgatatcgacataggggaaatccggggcgatcaggcctttggaaggggatgccttctttacctcgcagatgaaggacattcccggctcctttaacgccttttcaaaggaaaacacgctttccttcgcaccattttgccgggcttctgacgcctgggaggccaggttcatcatggtccccagggagattttttcttttgcagcctccacccgtttcctggtggaagcagccagtgtatctaaaatcatggcggcctcctgttacattccgccaaacggctgggagggggactttccggtttcgccggcagcagacggaatgttgtattggtttgttgcttttgcaaattcctccagcttggcggccgcctttccggaatcgattaaatcgtttgccagaacaatgcagtcttcgatggtgcagtcgtcaattccgagatagaggcttaaggcggagttgaataccacgatatcgcgcttgggtccggtgagctttccggttaagatatccctggtaatccgggcgttttcttctggatttccgcctaccagttctgataagtcacagcgggagaaaccgaactgttccggggtgatttcgtacatggtcagctctccgaaacggatttcgcacacatgggtcggtccggtgacggtagcttcatccagtccgtcgttgccgcagaccaccagtccccggttgacacccagattgctgagcacttttgccagcggctccaccagcttctcatcatagacgcccaaaagctgcatggtggctccggccggattggccagaggccccagaatgttgaaaatggtgcggactcccagttccttgcggaccggccctgcatatttcatggaagagtggtaggactgtgcgaacatgaagcacatgcccgtgtcttttaaaatctgttctgactgttccaccgtaagctttaagtttacgcccaggttttccagtacatcggccgccccgctcttgctggagacgctgcggtttccgtgctttgccaccggaaccccgcctgccgctaccacgaatgcactggtggtggaaatgttaaaggtgccggcctcgtcgccgccggtgcctacaatatcgattactgcgaaatccggttccagcttaagtcctttttctctcatgaccgtcgcacatgccgtgatttcatcgatggtctctcctttcatccggagtcctgttaaaaatgcagccatctgtgcgggagtcgtctcgccgctcatgatttcgttcatcacctcttttgccgcttcaaagcttaaatcctgtccttcaattacatcgtgaattgcctgctgtatcatagtctgttacctccatttataagaatgaatgctgttcgtttctgtttgcctgttatatgttgagaaaattcctgagtatcgtcatgccgtccggagtcagtatcgattccggatgaaactggagaccgtagaccggataattggtatggcggaccgccatgatttctcccatatcatcctcaccgattacttttaaagaatcagggagagaactgcgtctggcgatgagagagtggtatctggccgccggaatccttttcggaagatcctggaaaatgggatcgctgttgtcaatggtgatggtgctctgcttgccgtgcatcagcttagccgcatgaacgatctcggctccgaatacctcacagatgccctgatgaccgagacacacgcccaggatcggaacctctcccttcatctggcggaccacatcctcacagacaccggcatcttttggatatccgggtccgggagagaggatgatgtggtccggatgaaggttccggatatcttctgtggtcatcgcgtcgtttcggatcaccctgatatccggttccagcccggccgcctcggatccggcagattcccccggacgagagggggtaagacttattctgttctccagacagagcgtgccgaaaagctggaccagattgtaagaaaagctgtcatagttatcgatcagtaatatcatcagtcattcacctcgcttgccgcctcgatggcgtgaattacggctttcgccttgttggctgattcctcatattctttttccggaacgctgtcggccacaatgccgccgccagcctgaacatagacctttccattggtttttactgccattcggatcgcaatacaggtatccatgttgccggtgaaatcgatgtatcccagcgctccgccgtagatgcccctcggcaccggttccagctcttcgatgatttcacacgcccggatcttcggcgcaccggataaggtgcctgccgggagaaccgcttcaatggcggaaaacgcatcgcagccatttaagatatccccctccacctgggagcagatgtgcataatgcgggaatatttgtggatcatctggtatccggtgacctccacggtggagaactttgagatttttcccagatcgtttcgtcccaggtcgaccagcatgttgtgttcggccagctctttttcatcggccagaagctccttttccagtctgtcgtcttcctctggcgctgcgcctctgggtctggacccggctaccggaaatgtggtgagccgtccgtccttcaaacgaaccagggtctccggtgaggtgctcatgatctccatatcgtccatacgcaggtaaaccatgtagggagaaggattggtggttcgtagaacccggtaggcgttttgcaggcttccgtggtactcgctggaaaactgtctggaaatgaccgcctggaagatatctccgtccacaatgtattctttcgccttttccaccatcctgcagtacgtttctttggagatgttgcaggtgaattccggtttgtcgtccgccaccgatttttccagaggtgcagggtttgcgatcatctgagcgatgctctccagtctggcgcaggcggccccgtaatttgccatgcattccgcccgttgcccggtcttcatgttgaccacgatatcgatcttctgttttaaatgatcgtaggcgatcaccgtgtcgaacagcattaagtcgaaatcgctgcactctccctttttgatgttgagcgtcggctcggcataaccaatcataccataggcgaagtatccgatgaaaccgcctgtaaacgggggcattcccttaagttttggagagcggtattcctttaaaatatctctgagtatgtcgaagggccggtctgtttctatgattttttcggccgggccggctggtttccggcggatcgttaccacgcggtctttacaggtaacccggagaatgggatcatatccgaggaacgagtagcgtccccagttttcaccgccctcaatactttccagcaggcagtagcggctgcttaaacctgcgattttcctcagcagtgtgatcggcgttacaatatcggcgaacacttccctgcataccggaatgatgggatactttgctgcgagtgcttcaatttctgtacagtctggtgtgagtttcataactggtaaacgctcctttcgtgaatgatcgttattggcggtactttcctgtgacagcaaaaaagctcctgtccctcttacccataaactatggataaagagggacaggagctctataatttctcttctgcggtaccaccctgattgatgaataaaaaaattcatccgctctgtaacacactaacatgtgcctccccttggtaacggataggaaacccgtcggtatctacttccggccagtatacgccttccctgccttctcagacaggaccgcttatacggaataccggtttcaagccgccctcgcaagtccattcagatttattaccaacgcttccttacaccagccggaagctctctgcgcatgatagaaaaatcttacttactcctgctcatcggtttatcgctttgctttgctacagtatatgagatgaaatcgaaaatgtcaatattaattttcaaaaaaatgtaaaaaatttttcgtatgggtgccggagaataaaatagcctgtttctttaatcgaacataaacaaacatctggttcctagttaaaaatgaaaaataaacagaaaaaaacaaaaataatcttgacaaatccaacagattgatgtagtatacgaactagaacgaacatataatataacacaaacgaacatacacgatataggaacgatatggaaagcggtaaaagaaaagggggaacataatatgcctcagtgtatagtagttgcagatgatttaacgggggcaaatgcgacgggggtacttttaaaaaagatgaattatcagacgtatacggtgatgaattccgagcgtctggagctgtctctgtttgacagctgcgactgtgtcatgtatccgacggacagccggggagtgagcagttccctggcctacaaccgggtttacaatgtgacgaatctcttaaaggaagacggagtaaaggtctatgcaaagcggattgacagtaccatgcggggaaatgtgggaagcgagacagacgccatattagatgcgctgggagacgattacatagccatcgcggcgccctgtttcccggcatcgggaagaatcgtaatcgggggctatatgctggttaaggggcttccccttcataagaccgaggtggcgctggatcccaagacgccggttaccgtatcggacgtgaggcagatctttgaacagcagagcaagtatcccgttggaagcatcatgatgaacgacatgatgaacgggaagcattatctggccgaccgcatgaatgaactggtatctggcggatgcaggatcatcgtggcagactgtgtgactcaggaggatttagacctgatagcggatgccgtgatcacgagccagctgaaatttgtagctgtggacccgggagtcttcacggccaccatagcgagaaagctgatcgtcccggccgataagaaggagaaaaagaagattttagcggttgtgggcagcgtaaatccggtgacaaggcagcagatggaagaactgtggctggcccagagaactgcgtataatatatttgcagccaccagacgttttctggagagcggggaggagcgggaagcggaaattacccgcatcacggaagaggtgctggaggccagccgggcttatgatattttgactgtgacgggcgacggcatttatccggaaaacaggattgattttaaacagtatgaggatcgtttccccggcggtgtggatgatatgacgggaacgatcaacgattcctttgccgagattgcgcaccgggtattcactgcacaccagggatttaaggggatatacagcagcggaggagatatcaccgtttctgtatgccggagattccagacagcaggtttatgtcttctggatgaagtccttccgctggcggcgtacggccagttcctaaagggagacttcgaaggcgtgcatatcatcacaaagggcggaatggtgggcgaaagcgacgcggccaatcgctgtatcacatatctgaaagaaaaattatacatgtaacataaaaagagaatggaggaaataattatgaacaaaccattaatcgcaattcctatcggagatccggcgggtgtcggaccggaaatcacggcaatggccctggcggacagcaaggtcacggaggcagccagatgcattattgccggagacaaaaaaatcatggaacaggctgtcaggattacaggagctgagttaaaggtaaacgtggtgaaggaaccggaagaagggatctatgagccgggaatcttaaatctgattgacctggacaatatcgacatggatcactttgaattcggaaaagtgagcggaatgtgcggaaaagcggcttacgagtatatcgctgaaagcattcgtcttgccaatgaggggaaagcggacgcggtggccaccaccccgatcaacaaagaggcgttaaaggcaggcgatattcattttatcggccataccgagatcttcggggcgctgacagggacggaagatcctcttaccatgttcgaaaccaatggaatgcgcgtattcttcttaacgagacacgtgtccctgcgtcagatgctcgatatgatcacgaaggagagaattaaggattacgtaaaacgctgtctggaagccctcgagaagctgggcgtaaccggaggcaccatggcaattgccggattaaacccgcactgcggcgagcatggtctgttcggtgatgaggaggtacgggaaattatgccggccatagaggaactgcaggcggaaggctacccggtaacgggaccgatcggtgccgattccgtcttccatcaggcggcacagggacgcttcaacagtgtactttccctctatcacgatcagggccatattgcgacaaagacactggattttgacaggacgattgccatcacaaacggaatgccgatcctcagaacttccgtcgaccatggaactgcatttgacatcgcaggtacaggcaaagtaagcgccgtcagtatgatcgaggcaatcttactggcagcaaaatattcgccgaatttcacgaaataatagggtcagaaagctgtgagacggcagtaaagcagtatttcgtgtccggggggcatggaaatagaaagttaatttattttaaaggagggtttattttatggtaggtggacttagtgggcaaaggatgctgatcggtctgttgatcggtattatcgtactggtggttctggtcttaaagacgaagatccacgcatttctcgcactgattatgagtgcggttatcatcggactggtgggcggtatgccgatggtaaatgtaacactggaaaatggcaagacactcggcattatcaattctattacaaccggatttggcggtacgctgggaagtatcggtattattatcggcttcggtgtcatgatggggcagatatttgaacggaccggcgccgcgaaacgaatggctcagacctttttaaagctgtttggaaagggaagagaggaagaggcgcttggcattaccggattccttgtatcgatcccgatcttctgtgattccggtttcgttattcttgccccgattgcaaaggcaatctcaaaggtaacaaaaaaatcagtgatttcactgggagtcgcactggcggcaggtctcgttatcacccatacgctggtacctccgacaccggggccgttgggcgtctgcggtattttcggagtcgatgtgggaaaattcctcctgtttggtatcgtgattgcgattccgatggcgattgcctgtaccatttacgcaagatgggttggaaaaaagatctatcagattcctaacgacgacgaaggctttgaccgccttccctatcaggagccggactattctatagattttacaacggatttcagcggtcttccttccacacttgagtcatttgcacccctggtactgccaatcattctgattctgatcagcacggtatccagtgcacttggccttaccaccggttttatggagatattccagttccttggatctccgatcgtagcggtaggcttgggactcgtagtggcgattgttacgcttggaagaaacttaaccagagaagaagccattaaggaaatggaaagaggaatggcctccgcaggcatcatcatgctggtaactggcggcggcggtgccctgggccagattatcaaagacagcggcctcggtacatatatggcagaaggcctggcaggaacggcggttccgatcgttgttcttccattcatcatctccacggcaatgagatttattcagggatccggtacagtagccatgacgacggcggccagtatctccgcaccgattatcattgcggccggcgttaatccgatcttaggcgcactggcatgctgcgtgggctctttattcttcagctatttcaacgacagctatttctgggttgtgaaccgaacactgggagtaggcgaagtaaaagaccagattatgacgtattccatcacatcgaccattgcatgggcggtaggatttgttgaagttttgatattgagtattttcctgtaatcatatatgatagacacatgggattcatgtgcagataaaaaggctccgctgccgggtattccggtgcgggcctttttatttagcagggaaggcttgtcgtgatgaggaggcatagttatgatgttaatggccgaaaggcagttgaagattttagggatgatacaggataacggcagcgtacaggtggacgaactggcgaggaagctggatgtcagccccatgacgatccggagagacttggagaaacttcagaaggatgggctgattgagcggtgccatggcggtgctgtcaataagacagaggtaaactacgcggtaaaaagcgtcagcaaccatacccagaaggagatgattgcccggaaagcggcagagtttgtccgcggcgggacgacgattttcctggatgcgggaactactacgtatgagattgcaaagcatatcatggaatatgagaatatgacggttgttaccaatgatctggaggttgccctgcttttaaagaacagccgggtggagctgtttatctgcggcggctatattcagaaatcgacgggaagcgccgtcggctattatgcgacacagatgatggaaaatttccggtttgatatgggatttttcggcgcggccgcgatcaatgaggaatttcacgttctgacgccgaccatcgataaggctttcttaaaacgccagctgactcatcagtgccagcagtcctttctggtggtcgatgattccaaattcaaccggcaggggatgaattttattaataaactgtcggattatacgggagtgattacagaccatgagtttaaggaaacggaaaagattctgctgaggaaagaaggggcgcgtattataactgtttaagacgatgggtagaacaggaataaaatattttatgcaggaaaaccgcactggatttgagaaatccagtgcggttttcctttctttccccgtcagctgatatagcagaatgttccatcaccttttattgctccataagactcaaaaatccctctaccgcaaacggaaatgacggagtgacaggcacttctgtaatcttaaactgtgggaacagtttgtctgcaaaggcggaaaatatttcatactgcatgtgaggtccggccacggcgatcgtggccggtttatcctgtgtgactgagacgatggcatccatgacgcccccgttaatgactccttccaagtaggagcggcgttcggccagcgtcgagccggcgaataaatccatgctgcggacgacatacagcgcacggttgaagccgtaccggtggacaatatcgtagcccatacagaccatgttcggaagcagctccgtgcatttctccccattgatgctggaaccaagaatggtatgcccggccagggcatggtagagctcgcctgttatggtggaggaaatgttttcaatggttccgtcaaggagaaatgcggcctgcgtatgggaaccgggaagcagaataatgcttctgccgctggccagtccgggacagcggtggagaattcccagcagctctgtttcctctccgcgcatgttattggcgttcaccactgtatcgacagatgcagtcgttccctggggaagcgtcttgatcccggggatgatatgaacgtttctctgaaaaaactggccttcgtaataaacgacaatactgctttttaattttttaaaatccacgggagtagataaatgttcgatttctttcaatccggaaggacttgagatcataccggacatgtagatttctgcgatctgtgtatctgtgattcccgatttagtaagaagctggtcatacagctgttttaacgcagatataagaacggtccggtcctgatgcagggcggaatcacgggaacccactggaatatcgccgcggcatattatggttctgtctttcaggaggcaggcccgcgtgttagtagtgcctgagtcaaagtaaaagtaatacaaggaaacaccaactttcttattaaagttttgccgcataagcggccgccagcagccggatcctgtcaaaatcccccgcctgaacggcctgtttgctgacaatattagaaccgattcccacacagcgggctcctgcatcaaagaagtcacggatattatccagatttacacccccgaccgcggcgagtggaatgtgatgcagcgggccgcgaagtgcttttatgtaacccggaccggcagagtcggaggggaataccttcacaatgtctgccccttctgcatagcagcgtgccacctctgtagcagtataggcgccaggcatggaaagaagtcccagtcgttttgtctcacggataacagaagaatccgcattgggtgaaatgatgtaggcggctcctgcgttgtacgcggcatggagctgttcgagagtcataacggtgccggcgccgatgagaaccttgccctcgaattgccggcttaaagtgcggatgatatcggctgtgaccttcggtggggctgtctggtcaaaggtgatctcggccaggtgaagacctcctgcatggattgcttccaccgtcttttccgcacaatccgggctcaggcctcgaataatggtaatgattccgcctgccagaattttatcaaaagttgtcatgatgatgacctcctgtctaaagaacatgaaaaagatatattctgttgatataatgaaaagtttttgttcctatataggaactatattcttaaagtgctaattctattataggcgccgggaaaagtgtttgtcaattgttttttattgaaaagaaaatataaatataatatgcaataaaaaatccgatacaaaagaaagaaaacctacataatagacaatgaaatgcgaaaaaaaagattttctgtattgacagatggaaaaacatggggtatagtaaaaatatggttgatataaggaattgagttcttatatacgaacaaaaatattgaaacagaaagggatgcagggagagaaatgaaaattacagacatgaagctctattttatgccacaccgttttcttttgttaaagattgagacggatgcgggaatctgcggatggggagaaccgctggtagagggaagagctgctacactggaagcttccgtgaatgaatggcgcgactattttataggaaaagatccgttacggatcgaggaacactggcagaccatgtaccgccgcgctttctatcggggaggcccggtgctgatgagcacaattgccggtattgaccaggcgctgtgggatatcaaagggcattattatcatgctccggtatatgagatgctggggggaagagttaaggataagattaaagtataccggagcattcacggagatacaccggaagaagtggcagcggatgcaaagctggctgtaaaggaaggttatacagtcattaagacctcacctacagaccctacccattatgtggatacactgcaaagtgtgaataagctggtggaaaaggtgggggcaattcgtgatgctattggaaacagcattgatatggccatcgattttcacggaagaattcacaagcccatggcaaaagtgctggtacgggaattagatcagttccatccgctctttatggaagaaccggtgcttcctgagaataaggaggcgctgcgcgaggtcgcaaagtatacatctgcaccgattgccattggagagagaatgtacagcagatgggattacaaatcactgtttgagcaggggtacgtggacatcattcagcctgatttaagtcatgcaggcgggatcagtgaggcgagaagaatcgctgcaatggcagaagcttacgatgtggcggtggcacctcactgccccttagatgcgatagcattttcttcctgtattcagatgggagcggcaacaccgaaccttgtgctccaggaacagagtattgatattcatgatgccagcgatacaaacccgagaattaatttcttaaagaataaagaagtatttcattttgaaaacggcttcgttgagattccggaagggccgggactcggcgtggaggtggacgaggaaattgttcaggaacagaataagaatcgccataactggaagaatccgatgtggcggacctatgatggaacaccaattgagtggtaaagaaaagcaatacaaggaggagaagaaatggttaaaaagaatttggcaattggattatcagtagtgatggcagcttccatgcttgcaggatgcggcggaaaagaagcggcgccggagacgacagcggcagcagcagagactcagcagacagaagctgcaaagacagagggggatacggaagctgcagaggaaaagagtggagagaatgtgacgattacttatatttcgtccacgattctggagtctccggagggagacttcgaaaagaagtgcatagaggagtttaatgcactgggcaatggaattaccgtggaggtagagggcgtcagcgcgaacgacctgatgaaaaagtacataacccttgcaacatcgaattccatgccggacttttttatggccaatatgctggataccgctacaattgtagacatggggctggctgcggaaatcgctccgatttttggtcaggattatgtcgatggctttgaggatgtcagccttgcaagcgctagtgttgatggagtggcatacggtgcaccatggttcagcggagcatcagggatcgtttaccgtaaggacatctttgatgaaaagggagtagcggttccgaaaacatgggatgagtatgttgaggtatccaaagccctgaccggagacggagcctacggcaatacgctggtgggtgcaaacaacggttccggagcaggcagattccagtatgtaatccgtaactttggagtagacgagtttattcagggagatgacggaacatggactacggatatcggctcccagaagtatattgatgcactgcgcgcctataccgatctggatgtaacgtatcatacctgccctccgggagtcatagagactgattatccaactgcagtgaatctgttttcctccggcaaagcagccatgctgattaccggttccaacgcaattggtgccattacctctcaggttccggaattaaaaggtaaactcggttctttcccggtgccggcagtagagcgttccgtcagtacaccgggcggttttggatacttcattacaccaggtaagcatgagaaggaatccgcagaatttattaaatttatgcttgagaaggaaagagcccttgaattttccgttatgacgggccgtcttccaacccgtacagagactcttgacgatcccagcatcaacgatatgccggaactggccggtttcctggaagcacgccagactatttatgaaacaccgaacattccaggctacagtgaggtcaacgatgtacacggtcaggcatatcagtccgtatttactggagaatcaaccgtagaagaagctgcggccaaagcacagaagagagcacaggagatctgtgacgccgcgaatgaaggttaatggttcagtcaggaaagaccggctctgccctccggcagccggtctcttctgtatgtcgaggggagtgattatttgaagcacggaatgaatggaacgatgaaccgggtaaaaacgcgggcagcggcttatggctttgtcacgcctgcagtcatcactttggctttgctgcttctttatccgttctgttatggtatctatatcagtttttttaagacgaatctggtcaataaatggaactttatcggtctgaaaaactatgcaaaggttttaactgaggctgatttttattccagcatgaagatcacgctgatctttacggttggggttgttctgggacactttattttcggatttttatttgcggttatgctaaaccgggatataaagggacgcaccatattccgggctgtcttactgcttccatggctttttccggaagtcgtgattgcgaatctgtggagatggattttcaaccccacgatgggctttttaaacagcactctggtgtctgtgggaatacttaaggagccgatgtcctggctgggatcccccaaacttgcacttgcggtattgatctttatctgtatctggaagggctatcctctcgtgatgatccagctgctggccggcctgcagaccgttccgggagatatcatcgaggcagccagaatcgacggagcgggcaactggaaaaccttttggtatgtgacggttcccagtatgaaatcgacactttctgtcacactgattctcgatgtcgtatggtggttcaagcatgtgacgatgatatggctgctgactcagggaggccccaacggtgccaccaataccattggcgtcaacatctataagcgggcttttgaattctttgatttcggcccgtcatctgccctggcggtagtagtgttcctgatctgtatcgttatcagtatacttcagaggaggttgttaaaggatgaatagtcagaagagagtaaacgcgctttgttatatcggattgactctgggaagcctcattgtccttgtaccgattctctatatggcctccacctcgtttaagtccatcaatgaaattatgaccagctccaccgtaacgatgttcccaaagaaattttctacggaagcgtataaaaatgtgattacagagtatccgttttttacctatttaaagaacagcgtggtcatctctgtgactgcaaccgtgcttgcggttctgttctccacactggccggttatggattttcgcgtttccagttcaggggaaaaggtatgatcatgatgttcattctcgtgacgcagatgtttccggcggttatgctgttcgtgccctattataaactccttaccatctatggtctggcgaattccagaagaggaatcattctggtacacattgccagtgttatacctttctgttcctggatgatgtatggatttttcaacagtatttccagggagctggacgaggcggccagaatcgatggatgcagccatttgaagatattctggaagattattgccccgttgacgctgccgggtctgatctccacaacgatttatgcgttcatccagagctggaatgaatatatgtttactatgctgtgtatcacatcggacaagatgaaaactctgccggtagccatcgggcagatggcgagctatgataagatcatgtggaatgacttgatggccgcttccctgctgtccagtcttccggttgtggtgatgtttattttcctgcagcgctattttatcagcagtatgacgcagggcgctgtaaaaggctgattaaaatacttgtactaattgaaaaaagtgtgtacaatatgggtaactattcagctgtgcggcagtttacacattacccgaacataagaaggtgtacggctgaagcgttacaatatggaaaaaagaggtgtaagaaagtgccaaatgaggaacttcaccgcgcaacgaaacgtgtgattgatacgctggagcagctgacggcggcgcccccacagggaatgacgctgacagagctggcttccgcattaaaagctccgaaaagcagcctgttcccgattgtacatacgctctgtgagcttcacatgctgtccctgaattccgacacgggccggtactgtatcggatacaaggcctatgaaataggtaatgtatatttaaggagaggtggtctcaccactgatattcagacacagatgcatacgatcgtggaagcctgcggcgagacctgttactttgcccagctggtagacggagatgtattctacctttacaaagtagattccaccgagccggtccgttctgtggtatcaccgggccagcggctgcctgcctatgctacgggaatcggtaaagcactgctgtcgggcaaatcgaaggatgaactgaaacggctgtatccggacggtttaaaagcgctgactccaaatacgattaccgatatagacagactttcctaccagctggatgagatacagagaaacggacttgcgtttgaatgtgaggaatcgacacagtatattcgctgtgtggcggtgccaatccgccgggatggcggcgtcattgcggctatgagtattgccatgccggtattccggtatgatccggaaaaggaggcgctcacaatcagacttttaagagaagcacagctccgtttggagaagctgctgaagaatgcagattttaacggaattatgtagttggaaccggttatgcagatgttaagaaggtaagaccggactgagagatatcttaatgaaaataagaaacagcggaactccgtggattggaataatccctggagttccgctgtttttgcagcagcagacttccattttataaatgctctataattgggcaggagccttacgatacttcccgttcagtatgacaccctctgtcaaaaacgccctgtgaaaggtccgtgtatttccctgacaatcctcataggcctccgtgtgatccacaatccggaacagcgtggcgttccggactgtgcttaagcggcaccagtcggtgagcctcagtgccatcgcagggccggcggtgactccgtagagtatgtcttccagagaaacgccgcagccgtatagtttggagagcaggactggcatgctgcgcaccagttttctcacggagctttgatgcagatctgttcccatcaggacgcggggcagcggatggcggattgcccgttcaaatacgttgaaatcgaagctgctgcttccgtgcccaacatcgagccatacgcctcggtcaatcagtttttgaagtgcgtctgacggtgttccgtcagggttccatacgtcgccgccgcgtccattgaacacatgggtgaggatgtcccctttttcaaaatatggttccatatcctttaaatacgggggatttcctccgacatggaccatcatcggcacattggccttcctggcggccagactggctaaacgcagcggttcgagcccttcatgacggatagtctcactgcccatacgcacttttacaccggagatcagcccgggatattcggctatacaggcggcacagcggtcggcatctaaatactgcatggcattgtaatcatgatggaaaatcacaccgatcgggctgatgcagagaaacagccggatatttgtttcaatggcgggcgccacatacttcgtaaagccatgaatcgtatactctcctacagttccggcatcgaccagaagacaggtccctgttttccagccgaccgcatcggcctcggttccgaagagaccgaaaccgtcaaagatgtgagtgtgcatgtcgatccatccggggcttaagaataagtctgtttcagcgggaccgtcgtttcggtattcgacatgccagtcgccgtcacagccgctaagttcgccgttcagaaaacggtttttgtcagcatcatagtaccggaccagcgttttatcgttcatgccggttcctcctttccggtaaagtaaggaaacgattcagcttttttatcaggacaggaagatctggttcacgaagattgatggcatttaagaaaacgcggcacggatcaccagtgggatcaccagggtggaaggtgccaatgtcaatccgttccggcgcggaataaaggaagtcatagcactcttttccggtggtgccatcggtaaactgaagatagagcatggggatccgctgccccagacgcccgttttcctctatgtagctgtggtaaccgggaacgtcagagagaggggactgtatgttctccagaattgtctttaattcctgatagtctgcttcctcatccaggtccagaaaatccatgcaggcacggtaaaacgctgcatattcttccttgccgaccttgtatgggcggccgattcttacattagggctggccatagcccggcagtggtcgagaatctgatgacggcccagcacgattcctgttgtctgcggcccgtttatgaattttccgccgctgaaaataacagcatccgcttttaaatctaccgtataccaggacatcagagatttagggggaagctgcgcagccgcatccacgataacaggtacaccggctgcgtgtgctgtctcgatgatatcctttaagtcgggagtcgtccattcgtaaacggttccggtgaagaaaaatacggcagccgtcttcggaccgatggcttcccgaagcgctgaaatgctgtcttccacaggaatcagcgatgcgcctgaaagttccgttaaatgccagtatggaagaatcgggcagtttttctgagaggcaaatacaatgatctcatttttgggacaggcggatgcatccggcagctggtacatcagctcttcgttgcccatggtcatacaggcactggccgtgagtaccacgcaggcccccgcccccgaggagatgaatgccgtctcattgccggtccgctctgcgattcgtctgcagatggcgtcagacagttctccgatgtctgcaaagctttctgcagcttcctgcatggcctccagtgtgcggcggctcatgcgggaaccgccgatccgtgtgtaagtatcgctggcattgataatcgtgtcaacgttcagttcttcataaatattcatttctcctctgtcccttctcttttggtattggaatcggaatccccatgttccgttctggccagatccagatagttatacagcgtataacgggaaatctttaagtaatcacagacccgctcgctggcctttgtaatcagaaaagcgcccttcgcatccaggtaccctgtaaaacggattttttccaggcggttcatctcatcaaccggtttaccgatcatctcgccggcctgttcgatcagaaaatccagtacatcactgatattgcctgcaaatgtttccctgcattcttccaccggcttttctgtttccataccgggaacgtattggttgtactgatggagaattccttccagggccaccgtctgtgtgatgtccagattaatgcagaacgagccgatcacctttccgtcatcgtcatagagaaacatggtggatgaacgcaggatttttccgtccggagtgtggacaacgtagttataccggtcaccgtcctttacttcaccgcgcagtacctcaaggccaagattgcttccgcagtcaccgatcttacggccggtaatgtgaccgttgcggatatcgacaaccgtatgggcataatctttggtcagatcatgcaggatcagttcacagcgattgccgaattcattctccagcatgtttaagagtctctgccagaatgcccagttgtcgtagactgttttcataaatttcctccgtttttgttgtattgttttccatgatttcagtgtaccactgtgaaaaacgatagtcaaacaaaaagttgaaaatacatagaaaaataacaaaaatatgggcaatagctgacaaaatgttgaaaagtaagagcgagagatgatgaaaataaaatgaaatattgtaaatagtcaataaaaatcaacaaatagttagaaaaaagaaggacaggttattgatagacttcctccgcattattttttaaaaaagggatttcccagtcagccgggcattgaataataaatcgaacagtgttagaatatgtatcattgaaactgaaaagagaggcaactttctatataaggaacaggaggcaccggatatggcaaagataggtattatcggcatcggcaacatgggcagtgcaattttaaaggggctgcttcacgtatatggaaaaagcgacataatctttaccgatgtaaacagggagaagtgtgaagagatcacaaaagagacgggagttgcttatgcaggcagcaacgcggagtgtgccaatcaggcaaaatacatcattcttgcggtaaaacctcagtatttcgacccggtgcttaaaaatatccgcaacgtggtgacggaggccaacgtgattatctccattgcaccgggaattaccatcggccagctgaaggaaaagctgggaatagaaaagcgggtggtgcgggcgatgccgaatacaccggcgcttctcggcgaagggatgacaggcgtctgctacgatgcggaagcctttgacgacggggagaaagataccattcgggatatttttacatcattcggcgagatgtgcatcgtggaagagcggctgatgagcgcggttgtctgtgccagcggaagttctccggcttatgtatacatgtttatcgaggctctggctgacagcgcagtgaaatacggtctccccagggatactgcatacaggatggcggcccagactgtactgggaagcgcgaagatggtgctggaaaccggcgagcatccgggcgcactgaaagacaaggtctgctctccgggcggtacgactatcgcagcggtagcggcactggaagaacatggtttccgcagtgcggtgatcaaggcgggggacgcctgttatgagaaatgcgagaacatgaagtagccagctgaaaaaataaatttatgaaatgaaaaataaagggtgaaattggaggatatcatatggaacagccgccggtaaagcgtttaaacagggaacttaaatatcagggcactattttaaaaatatacgaggataccgtggaagctaacggccatgaggctcactgggattttatccaccacaacggtgcggctgcggtggttcccgtgacgaaggagggaaagcttctgatggttcgccagtaccggaatgcgctggaccgctatacgctggagattccggccggagctctggattatccggaggagccgaagctggactgcgcccaccgggagctggaggaggagaccggttttaagacggaaaaggagaaaatggagtatttaatcagcgtaaatacgacagtagccttctgtgacgaagctatcgacatctttgtagcaagggagctggagccgtccagacagaatctcgacgacgatgagtgtatcgatgtggaagaatggacggtagctgatttagagaagctgatatttgaaggaacgattacggacggaaagacgatcgcggcgattctggcatatgccaggaaataccacgtggaatagggcatagaaatccccctgcaggcatagattgtgacaagactaacctgtgagggggtttttatatatggcaatacggcttcggagcatgggaaggggacttcgaatacgaagcgggacgtttacgcccatccattttcagaagaatccggggactgcggcgggatacggaagcagcggaaaccgttttatcctgtttttctttgccggactcctggcaggaacagcagcggctaattttctgcatgcctcgttaagcgatcaggcggggtactacttaaatctgctgagccaccagtctgatctggggagatcggagcagctggcgctgtttggtgatatctgccgtcagaggatcatcgaggtactgattgcctggctgatcggtttaaccgcctatgcggtgccgtgcttttgtgtcctgagcgccggcttcggcctgtcggtgggggtggtcttatccgttatgacggggctgaaggggattttagggctcccgttttttcttgcgagtgtgatgccgcaggcatttctatatgtcccggtctggtgtctgctgctgttgtggggaatacggagaaacggcaggctgagaattccggccctgcttctggtactggcctttgttgcggccggcagtgcctgcgaggtatggctgaatcccttcttcctggggatggccgggtaaaatgccggaaaggccgcatgaaaagggcttttcgggcgaaatgaggaaaaaaataaaaaaaatatttaaaactttttttacaacatgttgcgagaaaataccctgcatttccaacatgttgtactttttatgtaaagtagtacgaaaatgcccctaaagtgggaaaaatgtgtttgattttatcgaaataactctatataatggataggaagaagccgattttggggctgttttgataccggcaggttaggggacgtagagatggttacggagataaatgagtttgtaaagtacttaagagaggtgaagaaaacctctaagaatacggaggtctcttatcacagagacttactgcagatggcttcctatctggaggagcagggaattacggatgtggagaaggtaacaaagacaagccttaattcctatgtgctgcatctggagaaggagggcagggcaactacaaccatttccagaactctggcatccatgaaagcgtttttccactatgaatatggggagggacggattcgcagagatccggcagaactcataaaagctccgaagattgagaagaaagccccgaccatactgaccgtggaggaagtgaacagtctgctggagcagccgaccggagattcgccgaaggagcttcgggacaaggccatgctggagcttctttacgccacgggaatccgggtttcggagctgattcatttaaaggtagaagacatgaatctggcagttggttttatcacctgccgggatgaacataaagaacgcatgattcctttcggtaaggttgccaggcaggccatggtgaattatatggaaagcgggcgtgccagtctgctgaagggccaggagagtgaatggctgtttaccaactgcagcggacggccgatgagcagacagggattttggaagattatcaaatattatggagagaaggccggtattcaggcggatattacgcctcatacactgcgccattcctttgccgcacaccttctggggaatggagccgatatccacgcggtgcaggccatgatgggccattctgatatggccacgacacagatgtacatgaattatacccggggtgaggcggttcgcagcgcctatgcgggagcccatccgagaaattaatatggtatgttacaggcagagccagattttcgtcaatctggcttttttttgtgcaaaacaatagaatatcatggtaaatgatcattttaagtgaaaattatacgatataacctttaaattgttctaccgactccaaactgttttacggtatattagcaaatagaaggctgacagttttcccgtacacgggatttgtacacttaggaaacagatggaggaaaagatgcaggtagatttactggaagtcacagaggcgtttgtagtaagctttggagtcaatatgacagtcataaaaacacctgatgacgatatcgggaattttgacctgggtatcaggaggacgttcaggaaagaggaaagtgcagggcagacagtgaagcatctgtacaggatctgccgggagggcgccctgtactttttagatgactgctttgaaatggaatactgtctgttccggatcccccgggaagaaagccagtacggggaactggtattaatcgggccgtatcagaaggaactggtggatgagtatcagctcaatctgctggtgcagtctcacagaattcccatggggctgatggcagagctgcaggaatactatcatgcggttcctgtcatactgctttatgagacctggatgtctgtactcacggctatggtcagaaaactctacggggacagggaagtggagatcgttctccgggaaagtcttgacgagtacggggataccaatatggtcagcagccatccggatgagccgctggcggtaaaactgatcgaagaccgttacaaagcggaggaggaactgatggcggccataacccagggcaatatggagaaagccttaaaggcgcaggggaaattccgcaatttccagattgccaggcggtataaggaccctgcgaggaacttcaggaatcttatgattacagccaatactctttgccggaaagccgcccaggcgggaggcgtccatccggtccatatcgatgaattatcctgtaaatgtgcgaagaagatagaaacgctgatgacaaagcaggaggcggaccggtttaatctggagatggtccgcaagtactgcatgcttgtgagaaattattctctgcagggatattcaccgctggtacagaaggtggtcaaccatattgatttaaatctggtgtccgacctgtccttaagaaatctggcggcagaattcaatgtcaaccccagctatctgtcttccctgtttaaaaaagaaatgtcggtgaccattacggcctatgtgaatcaacagaggatgaaacaggcaatccgttatttaaataccaccaatatgcagatacaaaatattgcggcagatgtgggaatctcggatgtcaactatttcagcaagctgtttaaacgggctacaggtaaaacgcccagcgagtatcgggagctgattcttgtcaggtcccagctgtagggcaggaagaaaaaaagttataattttacagatttcaacaaaaattctcctcatgcatttttctgagcgatgttaaaatgtcgttagaaaaggaggacgaacctatgatagatttacgttcaaagccattttacctgtctgatgaagacatcgcctgggtagaggcgacaaaagccggactttccctggatgagaagatcggccagctgtttgtcgatatgctctggggcgatacggatgaggaaattaagaggaggattgacacgtacgggatctccggtttccgttacaacaaccttccggctgaagatctgtatcaccagaatgaagtgattcagcggtgcagcagggttccggcgctgattgcggccaatgtcgaatccggcggaaacggtgctgtgacaggaggaacgaggctgggcgatccggtcgccatcggagcttccggcagtgcggaaaatgcctattacatgggatactacggctgtaaagaggcggcgtccgtcggctgtaactggacctttgctcctgtcgtggatatcaacaaaaattggcgcaactgcgtggtatccaaccggtgcttcggcagtgatgcggatatggtgcttgagatgggaaaggaatacatgagaggcgctggggacgcgggtcttgcctgctgcatgaaacatttcccgggtgacggtcttgacgagagagaccagcatatcgtgacgaccatcaacaccatgacctgtgaggaatgggatgaaaccttcggaaaggtttacaaaggcatgatcgatgccggcgtccagtccgtgatggttggtcacatcgcgcttccaagctacagccgtaagctgtgccccggtatccgggatgaggatatcatgcccgcaacgatttccaaagaacttttaaccggtctgctccgcgggcagctgggattcaatggtctcatcattacggatgccacccatatggtcggacttacatccaagatgaagcgaagcgaatttgtgccgtatgtgatcgaagcaggctgtgatatggtgctttattacagggataaagacgaggatgtggagaattttaaggcaggtctggaaagcggcctcttaagccgtgagcgctttgatgaggcgcttacccgtgtgcttgcgatgaaagccatgctgaagcttcacaggaagcagaaagaggggacgctgatgcctcccaaagaggaattaagtgtcatcggctgccaggagcacaggaagaaagccaatgaaatcattgacaatgccatcacgctggtaaagaacaccagaaatcagcttccattgactcccgaaacccataaaaggattatgctctacagcatcgattccacgcctgcggttatgcgcagcatgatgggcggcggtcaggatacggctgagagtatgatgaaggagtacctggaggaggcgggattttcagtaaccgtgttcactccggaggggaagaatggaaaacagctcctggcaggtacgccggtgaaagcgtttgtcagccagtttgacgcggtgattcttgtggccaacgtcagcggcttctcccagagcaatgagaggcggctccactggagcatgccgatggggccggatattccgtggtatgtgacggaactgcccacggtttttgtgtcggtcaataatccgtttcatctgatcgatgtgcctatggttccgacttatatcaatgcctacagtcctgaccgcgacgtcatccgtcaggtcgtggataagataaccggcaagtcggaatttaagggaagaagcacagtcgatgctttctgcggagcctgggatacccggctgtagtgaggcgcgctgtataaaaatatggtttaaaacaatcaggaggatttatacatatgggaaaaacaacgaatccaagcggtatgcaccgtgcaaagttgtggcagatcgggggatttgcatttaacaatacagctacaaacctgtatatgttcatgatgaacttcattgcgtactacttaaccggctatgtgggcgtcggagtggtagtcgcatctactttgattaccacgatgcgtatctgggatggggttaccgatccgttcatcggatacatggtagacaagactaattcaaaattcggaaagaaccgtccgtttatggtcatcggaaatgtgattctggcagtgggaagctttattctgcttcatgtgactcatttacttcccacgggggcacgtttcatcttcttcgtgctgatctacatggtttatatcattggctataccttccagtgcgtcgttacgaagtccgcacagtcctgtctgaccaatgatccgaagcagagacctttattctcaatcttcgacggtgtttacaatacgattgtctttgctttgattcctatttttgtttcaagctatttagtaccgaagcacggcggattcaatgctgcatttttccatgaattctggtgctatgtggcggtagcatccggaatcctgacctgcattgccatttactgtatctccagtaaggaccgtctggaatactttggaactggtaaggtggttaagattggatttaaggattactgggaggtcttaaagaataaccgggcaatacagatgctggtagtagctgcatccacagataaactggcgtcctctgtcagaagcaattccaccatcggcgttattctgtacgcaatcatctgcggcaactatgcgctgtctggtgcggtagccggttacacttcagtcccgaacatgctgatcctgttctttggcgtaggctggattgcaacacgcctgggacagagaaaagccatgctgtttggtacctggggcggtcttatctttaccactttgagtattgtcctgtttgccgtgggagatccgactcagctgtccttcccggggatcgccggtttcgcaggctggaacttctttactctggcattcctggcactgtatattctaggacagggctgtatgggagtatccggcaacatcgttattccgatgaccgcagactgtgccgactatgaggtctaccgctccggcaaatacgttccgggcctgatgggaactctgttcagctttgttgacaagctgatctcctctctggcagcaagtatcgtaggcgttatgtgcgccatgatcggatttaaagagactcttcccggcgtagatactccatacagtccgcagcttaagtttatcggcctgttctgcttcttcggtctgatcctgttcggtctgatctgtaatctgatcgccatgaagttctatcctctgacaagagagaagatggaagaaattcaggaaaagatagcagaaattaaagcgcaggcccagcaggcgtaggattggaggctgctcagatggaaaaaattatgatttccgggttttccgatgaaatcagcgctgattttgatgaacagttaaaagtagtttcagaactggggatggagtatatctccctccgcagcgctgacgggaaagggattgcggaatatacggcaaaagaggcggaggagaagctgcttccgggactgcaggccgcgggcatcagggtctcttccctgggatctcccatcggtaaggttgggattgatgacgaggaagggtttgcaaaccagctgatccagctggaggaactgtgcaggattgcgaaggtactggactgccgttatatccggatgttcagcttttatattccggaaggaaaagacccggaggattaccgtgagaaggtgattgaaaagcttgcaaagtttgacgccatagcgaaagcgcacgacattgtcctgattcatgagaatgaaaaggatatctatggagaccggaaggagcgctgcagggtgattctggatgcactgggaagcgatcattttaaggcagtgtttgattttgccaacttcgtacagtgcggagaggataccgtggaatgttgggagcttctccgtgaccaggtggtttatatccacatcaaggatgccgttgcatcggataaagaaaatgtgctttgcggaacaggcgaaggaaaaatcaaagaaattctgacgagagcgatcagagaagaggggtatgaaggatttttaacactggaaccccatctggtactgtttgatgcgctgcagtccttagaggtctctgatgccgagagtataatcaaagagaacaaggcaaaggatggagccgaagggtactcaatgcagtatcatgcgctgaaagaaatattgaattccatagagagacaggattaaagaaagagaggttgctgcatatgaataaggtaagatttggactgattggtatcggagctcagggcggtgcatacgccggatttttaacgggcagaggcggttttccgggtatgcccgcaccggagtgccctcctcactgcgcgctcggtgcgctgtgtgatacagaccctgcgaaggaagccatgtgtaaagaaaaatatccggagacgccattttttaaagactggaaggatcttgtgaattccggcacggttgatgcggtggtgacgaccgttcctcactatctgcacacagagattgcgatttactgtctggagaggggagtggctgttctcgttgaaaaaccggcaggcgtatacgccaagtcggttcgtgagatgaatgagtgtgcggcggctcatccggaggttcccttcggcatcatgtttaatcagcgtacgaacaagctgtatcagcgtgtgaaggcgattgtggagtccggcgaactgggccagatccgccgttccaactggatcatcaattcctggtggcgtccggacagctattaccgtcagagtgactggcgcgcaacctggggaggagagggcggcggcgtcctggtaaaccaggcgcctcatcagctggatctgtggcagtggatctgcggcgtaccgaacagggtatacgcaaagtgcatctatggggatcacagagacattattgtggagaatgatgtcaccatcgttaccgagtatcccaacggagctacgggaagctttgtcacctgtacccatgatcccatcggtacagaccgtctggagatcgacttggacggtggaaagattgtcgtggaggacagccgtacggctacggtttatcgtctgaaaaaaaatgaagacgagttaaaccgcacgatgtccatgatggaactggtaaaattgacacaggggaatgctgcaggagcagacggcggcctgtacactgtggaaacctttgagaatacagatggctggggcgtacagcacatgactgtcatggagaactttgcatgccatatggtggaggggactcctctgctggcaccgggctccgacggcatcaatggtgtaaacttagccaatgctaccctgctttccagctggctgggcagggaagtggatatgccggtcgatgaagacctgtatctggaagagctgaacaggaagattgccgcagaaggcaaatttccaacccgttagttgaaaggcgccggtttgacagccggcgcgctttcgcagaaatggaggaagaaagatgaaaaaggctgcagtaattggattgggggatatttcgaagatccatataccagtcatagaggcaaatccggatatcactctgtgcgcggtatgcgacaacaatccggagctgaaggaaacagcgccggaaggggccgccttttatacggattatcgtgagatggcggagaaagaaaaaccggactgtgtccatgtatgcctgccccattacatgcattatccggtgacaaaagaactggcggagatggggtgcaacgtcttctgcgaaaagccggccgccttgaattccgaggaagcagagctgtttgtccggctggaagaagcccatccggagattcgaatcggaatctgtctgcagaaccgcctcaatgaaagcgtagagctgctgaaagagatcatagagagcggcgaatacggtcaggtggtgggaacgaggggaatcgttccctggtaccgtccggctgagtattacagcgcgaagccctggagaggaagatgggatacggcgggaggcggctgtatgatcaatcagtcggtccacacacttgatcttctgtactatctgggcggagatatcaaaggcctgaacgcctccgtaagccagatcctggattacggcattgaggtggaagatacggtgactgcacggctggattacgtaagcggcgccaaagggctgttctttgccaccaatgccaattataagaatgaagcggttcagatcgccatccagctggaacgcggcgagttccggattgaagaaaatattctgtatcagatcctgccggagggcgggagaaagaagctggctgaggaccggaaatttccgggaacccacttctattacggcgccagccatggaaaattaatcgacagattttacagagtgctggaaatgggagaaggagagtatatcagggtgaaggatgcgaagatgagcatccgcctgattgatgccatcttagagtccggtaagagcggttcttacaaatccatcttataagtttagaaaggggatatcacatgaaaaaagggttaattggtattcagatgagtaccatcaaagataagattgcagagcttggggcttacggcaccttaaaagcctgtgcggagctgggataccactgtgtggaggtttcccagattcccatgacggaagagaatgtggctggaatgaagaaggcctgtgaggaattcggcataaagattgccgctttaagtgctgccgtagagccgatgatgccgggcatgccgggagaatacttaaccacggattttgataagatcgtggctgactgcaagactttaaactgcgatatgctgcggatcggcatgctcccgatgacctgcatgggaagccgtgagaaggctctggattttgtgaaacgcgcagatgaaatggccggaagattaaaagagcatggcatagatttatactatcataaccaccatgtggagtttgtaaaatacgatggggaatacttgctggacattattaaaaacaataccaggaatatgggatttgagctggatatccactggattcaccgcggcggagagaatccggtggaatttatccggaaatatgacggaagaatccggctgcttcatctgaaggattaccgcatcgggcagcttaaaatgccggaaggagcgtttgatccgaaaacgtttatggctgcctttaccgatattgttgagtttgcggaaatcggtgagggaacgcttccggttaaggagtgcatcgaagccggttttgcgggaggcagtgagtatttcctgattgaacaggatacaacctatggaagagatccgtttgagagcctgagaatcagcaaagagaaccttgagaaaatggggtattccgactggtttttactggattaagcgggcaaagactgatcagggagtaaggcggaatgaagcggctttcggcggcaggaggtaaaataatgggaaaaagaagaaaacaggacgatccggattacgtggatccaaaaaagatgattgctctggaagaggagatggccgctctgaaaaaggagtatggaattgaggataagccgagatggtgggtccggattggtgactttatcgccaatcatgccggaaccagacagccggtgcctgtattccgaaaaaaatatctccttttggccctgtgtctgggctgggccggcggtcatcggttttatacgaagcagtatgccctgggtgttatctatctgctgttttgctggaccggaattccgtttgcaatgacactgattgacttaatgattgcgctgccaatgaaggcagacgagcagggaagaatgcttctgtaaccgttacagaggaaaaagtaaaacaaaagaaaaaacagactgatttctttgcgtgcctgtgttataatggaagggccgaaaagagcaaagaagattcggaacgctgccggaaactgctcgaggtttccggctgtttttgtgtttggctgaaagccaatactttatgatgtatgaaaaaaaataaaattacaaattataaagacgaggtaaaaaggtatgaaaaaattagaagattacgtaacaagtatccccgattttccggagccgggcattattttccgtgatgtcacgaccattcttcaggatgcggacgggctgtctctggcggttgacggcgtgcgcgggatgttaaaggatgtggattacgatgtggtagtcgggccggagtcgagagggtttatcttcggcgttccggttgcttacgcagagcacaaaggatttgttccggtgagaaagaagggaaagcttccgagagaggtcatttccgctgattatgaactggaatacggccaggccaccattgaaatgcacagggattccattcagccgggccagaaggtcgttatcattgatgatttaatcgctacaggcggaacgatcgaggccatcatcaggcttgtgaaggagatgggcggagaagtggtaaagatctgctttatcatggaattaaagggcttgaacggaagagaaaaattaaaagggtacgatgtggaatctctgattgcctacgagggaaactaaaggattgaggtgtagagaatggataaaatcctgtaccatggaacatttctgacaatggctgagaaccggccggaacccgaggcagtgctgatccgggacggtgtgatcggcggaaccggtacgctggaggagatgagaaaactggctccggacggcatgctccgggatatggagggccacacggttcttccgggctttattgacgggcattctcatttgagcgcagtggcataccagctgctggtcgccaacttaaaaccgtcgcccctcggtccctgcaacagcgtcgaggacgttgtgcgggagctgaagggatttctggagacgcattcgctgaggcccggccagtggctgatgggaatgggatatgacaacagcgtattcccggaaggtgcccatcccacaaaggaggatttagaccgcgtaagtacggaaattcccgtcgcggcggctcatatttccggccatttatgcgtggtgaacacgaaggggatggagcttttagggtacacaggagaacattttaaagtcccgcagggcggtgtggtggagcctgcagggcttttgaaggaacaggcgtttctcgggaaaaacggggagatgcaggggccggctcccgaggatgtggtgaaagcggtaggtgatgcctcaaagctgtacgcttcctacggcctgaccaccgttcacgacggaaaggttccggaagggcagtaccagctcttaaaaggtgccgctgccatgggacttctaaaaaacgatgtggtcatgtatctcgcaccggagctggcggatcagctgctgacaggaccggggccggaagcgcttgcggcaaagggctatgagcaccatctccgtcccgctggagtaaagctgtttctggacggatctcctcaggggaagacagcttggctgtcggaaccgtactacgtggttccggacggtgaacagccggattaccggggctttccggtgcagtcggaagcgtacgtaatggacgtgatgcgtacctgcgtaaagaaccgctggcagatcaacgtgcatgccaacggggatgaagcgattgagcagatgatccgatgctatcagtcggtactggaggagacagggagtgacagggatctgcgcccggtggtcatccactgccagaccgtccgggaggaccagctggcacggatgaaggagatcggcatggtggccagctttttcctggaccatgtgtattactggggagattaccattacgagtctgtgctgggaccggagagggcagagcgcatcagcccggcccgttcggccctgaagcatggggtttcctttacgcttcaccaggacagcccggtagctccgcccgacgtaatgggcgctgtacacaatgccgtaaaccggaagacggaaaaaggccgtgtgctgggacaggagcagaccatcactgtgatggaggcgctgaaagccgtgacgctgaacggagcgtatcagatcttcgaagaggataaaaagggaagcattgaggttgggaagacagcggattttgcagtgctggaaagaaatcccctcacggttccgaaagaagagatcagagaaataaaagttcttgaaacgataaaatcaggagagacaatcttcagacgataagggaatggctatccttacggaggccggccgcaggtttaagtctgcccaaagtcagaccatgcggccggcttttgtgcgattacacgatgccgcaggtgaatggggaagacttatgattcggccagccaatgttatggaaaaccgcgtaaaataagggatgcaaccgcaggtagcgtgaaaaaaaacggaatgctacgccaggttggtggaagtagcgcctgtgcaactgtagaataaaaccataaaatatatcctacaggaggaagtatgtatgagtttttctgataatttacaagtgttgagaaaaagaaataatatgacgcaggaacaactggcagagcagctggaggtgtcgcggcaggcggtttccaaatgggagtcgggacaatcctatccggagatggagaagctgttcatcatctgtgatatgtttcactgcgacatggactccctggtcaatggagatttaacgctggaggaccaggcggatgcggcgggatacgaccgctttatgaacggattctcctgtcgaatcacaggcagcataactctgattctggcagcggtcacgctgatggcgtttctggatgggctcgttcatgaggatattctggcagtctttctgatcgcagcggcaggcgtggctgtggcagtgatgattgtaagcggcattaataaagaagccttcgaaaaaaaatatcctcatattcaggatttctattcggaagaagagcgatccggttttaccagaagatttggtattgccatcgctgccgctgtatgcctgattctgtttggaatctgtgtgaatatcgcagtggattccatgagctttccattaaaggaacagctttccggcggatttttcctggtctgtgtcaccgttgcggtgggtatgtttgtgtattttggacttcagaaggaaaagtacgaggtggaggaatataataaacgccatgacgggagcagagagaaggggaatgcgatcgtgggaaaggcgtccggcgtcatcatgcttctggctaccgcggtcttcctttatttcggactggtctgggatatgttccggagcgcatggatcgtctaccccatcggcggaattctatgtgccgtagtggctgtaatctggggagataagaaaggctgatccattttatttttttacatacatgaggacggaatattgattcctggtttcctttgtgctatgatgaggacaaaaataattgtatacaaaatacagtaatgttccaaacagcgaaaggaagggattatcatggctgtccatgtaattgatgaagctaacagatgtttaaactgcaagaagccgttgtgccagcaggggtgcccgattcacacaccgattccgaagatgatcgaagcgtttaaggaaggtgatttaaaccgggcgggagatatggtatttgccaataatcccatgtccttagtctgctcactggtctgcaatcacgagaatcagtgcgagggccactgcatactcggcagaaaagggcagccggttcacatcagcagcattgaaaactatgtatccgatacgatttttgataaaatgaagatcgaatgtcagccgaaaaatggaaagaaggttgcggttatcggcgctggaccggccggaattaccatcgccattctgctgacgaaaaagggttacagcgttaccatcttcgattcaaaggataaaatcggaggcgtactgcagtatggaatccctgcgttccgcctgccgaagacaattctggaccgctataaaaagaagcttctggagatcggcgtaaagatcaggcccaacacggccatcggcacggcgctggaaattaaagacctgttccgggacgggtacgaaagtatttttatcggaacaggcgtctggagaccgaagacactgggcgtaaagggagagtctctgggaaatgtacactatgccatcgattatctggcgaatccggatgcctacgacttgggagagcgggttgcagtcatcggcatggggaattcggccatggacgtggcccgtaccgtgatccgtcacggtgcccgtgaggtaacgctctatgcgagagggcttgtgagcaatgccagtgaacatgaaaccgcttatgccagactggatggcgcggcgttcgagtttggaaagcagattgtggagatcacagacgacggtccggtgtttgaaaccatcctctacgatgcggaaggccgtcagaccagagttgaggagacgacggagcaggtttacgcggactccacgatcatttctatcagccagggaccgaaaagcaagctggtcaatacgacagaagggctgaaggcatcgaaaaatggtcttctgatgactgatgagaggggacagacaacgataccgggaatattcgcctccggcgatgtggtgttgggagcacggaccgtggtggaggcggctgcttactccagggtggtggcagaagccatggatgaatatatgaaaaccaacagtccgctgccgcaggaacatgcggggaaatgactgggccagactgtgcggtaagcaaaaagggagcgccggaaagcaaataaagtagtttgctttccggcgctcccttttcaatacgatgatgacccgtatgatgaatgtgcgggctgttgtttctcaccggggagattacggaacggagaagccgcttgtggacggagaaccgttccactggtccccgtcagaacggtaatacagtcttgtgacagaaccatccgttttggtatagtctatgacgaagacctggccggtttcaatccgcatggggtaattgttataaggaagattatcactggtcagttcacagtccttaaaatcgtcgtaggaatgttccaggcgccagaactcacggaatgagtaatcctgaaagcctgtcatatcctgtttcccgaaataggcggcctcatactcttttccattgaccgtgagtttgtcagttccgacaggggtgctgtcctttgtcgccaggattaagtcttctgaatgaatgacatcaccgtaatgttcctttaactgttttgccatgcagggaattgtgccggtgctgtccagggcttccggattggtatgggcgcctccgtagatgcccataatagcttccccgtttaatttgtcgtattcccggataaagttctcaaccatcatgttttcgcggtagacattgtctgaatggtcgtaataataatttgcctgttcgattatctcttgagaaatacggtactgctcagagtcttccagcccattttcctttaaatattccaaatagcgctctccggttgaaaaatactggtgtcccacgtcggttccgtggaacacggtctcggggcactggcttttaatcgcctgatagaacggcttgatatatggattatgcgcggctgagccctcccagtcgtcatagagggcgttgaggatctcgtcgctgtctgacttcatccagagatttagatattccgcggtatagtatggcagttccacgaacaaatgtctcatattatgattgtgatagtggtcattccatatctctacttccctgttcagaattttttccacggcatgctgctcgccgtataagtagatctgaccggcctgtggctgtacagccccggattcagccgcctgttgtgcggttggctgagaggcggggtcagccgtctgctgtggggcaggctgggaagcggactcagctgtctgctgtacagcaggatgagacatagactcggccgcctgcgccggcgctttcgaacaggcggtcaggcccagggcaagtgtgagggcaagaagcggaagaacgcctgctttttttatgattccggtgaactgcatgatccggttcctccatatctgttaaaccaggcccgctcttcaaatggctttttctttgcctgggggccgggggttgcaggatagccgaccggcatgtagacatagacggtctgatcttccggtactcccagcagtctgcccatcttttctgccctctctccgcggatctgaccttcgatccatacggttccaaggcccttgtcggccgccgcaagatagatattttcagcagcggcacagtagtcatgaacgtggtaggagactccgctgggtgacatggtgaagctgccgatcagaagaatggcggcggtggctccctttgcccattcgtggttgtatatctcggcaagtccggccagcagctccggatcatcgacaccgatcagtttcgtagtttgtaggttgcagccggagggggctgagtaccctgcctccagaagctccgttaaatcttcccgggagacgggagcgtctgtaaacggaccgcgaaagctcttgcggctgcggattgcgttcatagtatccataattgttactctcctttcttttgcctgtgtggctggttgggggcggaggaccagtcgctttccgtggcgtctgcacggtaaatccgtctttctccgttggatttgtgcagatagatctgctcgtccggatagtagcaggtgtcctcgggatccacggttccgatgtcgagaatgcacaaattttcctcgccggaattgtagaaggaatgggcgatgtttctgcctgcaggtttggcgagaaagtcatccggtcccaccggataagtctcgtcattgaggcggagcgtcccggttcctgacataatatagaagaattcttcctgacaggaatgactgtggtacgttgtgctgaaagcaccgggaggaatggtgtccaaatggatgtaaatgcgttcacttcccaccgattttcccagatcttctgtaatgagtcctgccgcatctttccagataaaagacgggtccagagaacgggaatttcctgttttgctattttcttttttgtttttcatgaaactcctttttatgtatgattgatctgccgcggaggtccgtatcctgattctaatcataatgcttttttagaaaaaatacaacccgaaacgctctttcatcaattttatgattatggtatactggttctatcattttgcagaaacgagggattgattatgggaagaccggaaacggatttacacctgcatctcgatggttcgctgtccatcgatgtggtgaagacgctggcagatagaattgggtatgattttggcgggaagaatgtaaaggaattgctgtcggtaggagaaaactgtgaaagcctgccggattatttaaaatgctttgatttgccggggattctgcttcagacggaagaagccctggagtatgcggcctgtgatctggtaaagcggctggccgggcagggactggtatatgcagagattcgatttgcgccgcagctccataaacagaaggggctgacgcaggggcaggcagtggaagccgttgtaaaaggggtgaggacaggctgtaaggagaccggtatttacgcaggagtcctgctttgtgccatggtaaacggcagcgatgcagagaatgaggagaccatggagctggcgaaggcgttttgtaaagaaaaggctgtaaacggcgtggtgggagcagatattgccggaccggaaggcttcgttccgatggcgcattttgaaggaatgtttaagcgggtgtaccaggccggagtgccgtttacgattcatgccggagagtgcggggactatgagaacgtagtcagggctgtggcctttggtgcaaaaagaatcggacacggatgcgcggcgattcagtcggaagagtgtatgagactgctggagagagaaaaaattactctggagatgtgtgtggtgagcaatttgcagacaaaggcggtggccgggatagaagatcatccgcttaagaagtttttcgacaggggcataagagtaacgtataataccgataatatgacggtatccgatacttctcttgagcgggaggcggaactgatcacgaggaaactgggattccgggaagaggatttgagaaagatgaatgagtatgcggtcgagggggcgtttgccggggaagaggtgaagcaggagttgaaaaagtgttttgggggacagtaggatagaagggccggatcgcggcaataaaaaactatttgcatttttcgtcaaaaaattttataataaatgttaactatgtttaaatgaaacgataagttgcgaaaaggtgacagtatatggcagatgaatcaaccatggaaaaactgaataagactccattgggagttggaagggttgacggtgcgatggagatcaagtcgcctaacgatgaggaactggaggcaccggcagattttaccagtcccgaggtactgtatcaggaattgatcgccagtatccggagataccatccttccgatgatatcagcatgatcgaaaaggcctatcatgtcgctgataattttcataaggagcagaagagaaagtcgggtgaaccgtatatcattcaccctctttgtgttgcgattattctggccgacttagagatggataaggagacgatcgcagcggggattcttcatgatgtggtggaagacacggttatgaccctggatgagctgggaaaagagtttggggaagaggtggcgcttcttgtcgacggcgtcacgaagctgactcagctgtcctggtccatggataagatggagctgcaggccgagaatctgaggaagatgttcctggccatggcaaaggatatccgtgtcatcatcattaaactggcggaccgtctccataacatgagaacgctccagtatatgaagccggagaagcaaaaggaaaaagcccgtgaaacgatggagatctacgcgcccattgcccaccggcttggtatttccaaaatcaagatcgaactggatgatttgtccttaaaatatttgcagccggacgtatattacgatctggctgagaagatttccttaaagaaagatgccagagagtcatttgtaaagagcatcgtggatgaggtgcaggaacatttaaaggaggcctccattgtagccaaggtagatggaagagtgaagcatttcttcagcatctacaaaaagatggtgaaccagaataagactctcgaccagatttacgatctgtttgccgtgaggattattgtggacagcgtcaaggattgttatgcggcgctgggcgtcatccatgaactgtataagccgattccgggacgatttaaggattatatcgccatgccgaagcccaatatgtaccagtcgctccatacgacgctgatcgggagcaacggacagccgtttgagatccagatccgtacgtatgagatgcacaggactgcggaatacggtattgctgctcactggaagtacaaggagagcggaagcggccaggtggctgcaggcaaggaagaggagaagttaagctggttgcgccagattctggaatggcagaaagacatgtcggacaacaaggaattcttaaacatggtcaagggcgatttggacctgttttccgacagtgtttactgcttcactccatccggcgatgtcaagaatcttccaagcggttccacacccattgactttgcatactccatccacagcgcggtaggaaacaagatggttggagcgcgggtgaacggcaagctggtgaacattgattatgtcattcagaacggcgaccaggtggaggtcattacctcccagaactgtaaggggccgagccgggactggctgaatattgtaaagagcacccaggctaagaataagatcaaccagtggttcaagaccgagctcaaggaggataatattctccggggcaaagagatggtggaccgctactgcaaggccaagggaatcgtctattccgacattaataagccggaatatcaggataaggttatgaagcgctatgcgttccgcgactgggattccgtgctggcatcgatcggccacggcgggctgaaagagggccaggtcatcaacaagatggtggatgaacgggcgaaaaagatgaagaaagaggtcaccgataccacgattttaaatgatatcgaggacatgagtaataaactgcctgtcaacaagcacagcaagagcggcatcgtagtcaagggaatccatgatcttgcggtccgtttttccaaatgctgcagtccggtaccgggcgatgagatcgtaggctttgtcacacgcggccgtggaatctccatccacagaaccgactgcgtgaacgtcatcaatctcccggaagatgagaggagccgtttgatcgacgcggaatggcagacaccggagggcgacgatacgaaggaacgctactcgacggagatcaagatctatgcaaacaaccggatcggcatgtttgtggatatatccaaggttttcacggagcggcagatcgatatcacctccatgaattccagaacgaataagcagggaaaggcgaccatcaccatgacgtttgatattcatggcgtggaggaactgaaccggctgaccgataaactgagacaaattgaaggtgtaatcgatatagagaggactgcgggataacgcagttttctcttttcttaaataccagcggagagaggataaacgtatgagcaatttcagaatcagaacgtgtactgtaggtatggtcgggactaactgctacctggtttaccgggaagatttaaaaagggcggtaatcgtggacccgggagataacggagcccatatcctgaatacgtgcagggagtgtgggattattccggaggcggttgtgctgacccacggccattttgatcatattttagcggtggaggagatccgccgtgcatttaaggagataaccgtttacgccgctgagaaggaagcgaagcttctgggcgatccacggcttaacctgaccgcctcctatggaaccggagttacactgagcccggaccatttagtaaaggatggggatatcctggagcttgccggtttcaagtggcaggtcatagagactcccggccacacggagggctctgtctgcctgtggatcaaagaggaggaggttctgatatccggtgatacgttatttgcggaatccctgggacggaccgatttcccgacgggaagctctgctgatatcatacgctcgatcaaagaacgattattcgtacttccggatgacacgatggtttatccgggacacggggagccgactaccatcggacatgagaaaacccataatccggtcgcattttacaatagataggaacgaacataccatgataggaattatattagacgacaacgcgtacgagcaggatatccgggaactgctcatggctttttacccgggagagacatatattcatgaagaaagggacggggatgagatgccccgtttctctgtatatggaacaacaggaggaaaccggtattccctgaccgtcagagagtatggggaagatggtgaaatgctggagaacaaggcatccgtggaggcggatttttccaatcgttttgagactaaaaaccggattaaacgcatgctttacggcctgctctcggaaaagacgaagaaagaactgccatgggggacactgactggaatccgtccgacgaagatagccatgacaaagcttctggaagggaaaaatgaggacgagatccgtacttatatgaaggagacgtatttagccagcgacgccaagatcgatttgagtatcgagattgctgagcgggaacgggagcttttgtcggcaattgattacgaacacggctacagcctgtatgtcggaatcccgttctgccccacgacgtgcctttactgttcctttacctcattccctattaaaaactgggaaaagcggatggaagaatatttaacagcgctgtttaaggaaatggattatgtggccgaaaccatggcaggccgaactcttgataccgtatacttcggcggcggaactccgacatcgctgtcggcggaacacttagagcgggtgatggagaagctaaagaccacatttgatttttcagaagtgaaggaatttacggtagaggccggcaggccggacagtatcacagaggataaattaaaggttcttctggattacggcgttacccgcatctctatcaatccccagactatgaagcaggagactctggatttaatcggccgccgccatacggtggatctggttaaagaaaaataccgtctcgcccgggaaatgggattcgataatatcaatatggatctgattatcggactcccggaggaggatttggaagacgtccgccggaccatggaggaaatcaaagcgcttgatcctgacagtatcaccgtacattccctggccatcaaacgcgcggccagacttaacatgtttaaggagaaatacggagacttaaagataacgaacactcaggagatgatcgatttgactgccgcctatgcccgcgagatgggacaggagccctactatttataccgccagaaaaacatggccggtaattttgaaaatgtggggtactccagaccgggaaaagcgtgtatctataacattctgatcatggaagaaaagcagacgattgccgcctgcggagcgggaaccacgacgaaggtggtattcccgcgggagaaccggctggaacgggtggaaaatgttaaggatgtggagcagtatatttccaggatcgacgagatgctggagaggaagggaaaactgcttgggaagatcgtttagtgtctgcgggcagcaggttacagggggaagagattgaaaaggcagcggtctattgtaacacagacagtcacgagagtttctattgtgggtcggatagacccagttgagtgcgcgaagcgcgcgaaatagaaaccacccgctatgcgggtgcgcggtgttggttataccaaaaatcactcagcctgatataatagaggtgtccaagccactattaaaaaggagagtgattttatggcgaagaaagccaatgaattagcgcatacaaagtggatgtgcaagtatcatatcgtcttcacccctaagtatagacgaaaagtgatctataatcaatataaagaagacctgagagatatcataaaacaattatgtaattataagggtgttcagatactggaggggaaattaatgccggatcatgtgcatatcctggtgagtatcccacccaagataagcgtatccagttttatgggctatttgaaaggaaagtcagcattaatgatgtttgaccgtcatgccaacttaaagtacaagttcgggaatcgtcatttctggtcagaaggatactacgtaagcacagtgggattaaacgaagacaccataaagaagtatatacaagatcaggagaaggcagatatcatgctggacaaattgagtgtgaaagaatatgaagacccctttaggggttagtcggtattcagatagccccttgaaggggcggcaacagaggtaaaagcacaaagtggcttgaacgaagtgaaagccagcgccttgagacgctggcctagtaacaaaggcttatagccgaagcgcgagccacccgttagacgggtggcagcgactgtgtttatttcagcaattgttctgttgacgattgtgtttaccatatttatcggaagatacatgagagaaaatattctcaggagtaaagaggaacagctggttactgtggcggatacgctggacagccggctgaagagcctggaggagccgtttgtaacgctgtcaggatacacgccggcggtcaggctgcttcgcggacattatgctctatactctcccgagtggatgcaggcggtgcgcagtgttgattcatttttgaccaatatcaatctgttcagtgattatatcaccgatgtgcttttcatccagcctgattctgccgttgtgtacagcatgaacgatattctgcgaagcggttacgattacgtcaatgcagaatggtttttagaggcgtccgccagggatacctttgttaaatatgcgtctccccacgggagagaccatatgtatgagaataaggggccatatcagacggttacggctttctatccggtccgccagtcggatcagctgctgggctatattatgatggagtgcgatttggacaaactgacggatttcttttccgcagagcagatctccgattccggttttgtcattcttgacgagaataaccggattatcctggactataaggaggggcggaccgggctggaacagcttggagagtcgccttttgaccgtctctctgcgggggagtgtgagacggtgcagacggaccggtctgtctatatcggtaaaaaactgtcgaaccggtggacgatggtatcggagaacagcctggacattgtcacgcgtcccatcgggcagctgctcgcggtagtggcagcgatcatggcggtggtcctgatgatcttaggtctcgtctcagcctataacagtcgcctgatcaagcggccgttcgacgctttgattcagagaattatatcctacgacggaagccgctccacggctgttgcaggctttgaacatgcgccccaggagctggctgtcatacggacccggttcgaggagatggcggatcatatgaacgacttgatcaatgacgtctacgtggcgaagctgaagcagaaggaggcggaactggaggcgctgaccaatcagatcaacccccacttcctgtataatgtattccagctcatccaggcgaaggctgtactggcggacaatttagagatcgaagagatgatccaggcgctcagccgtatgatgcgctacacgatggaacggaagagggagcgggtacctttaggagaagaacttgcgtataccgacgattatctcatgttttataaaaagcgcttttcttctatgtttacctatgagattatctgcgatccggagctttctgactgcctgacctgtaaatttatacttcagccggtggtggaaaactgttttaagcacgcgcttaagaaccggacgggaggcgtgatcgccatccgcgctgagaaaagtggcagcgatatcgtgatatcagtgagggataacggatgcggcatgagcggcgagactctggccatgcttcgcagccggatgaacggccaggcggatgccgggggaatcgggatcgtcaacacgaattcccggctgcgattaacctatggcgaggcgtacggcattaccattgacagcagagaggcggagtatacggaggttatgctccgtatcccatacgaaaccgtataattgggggaaattatgtataaggtttgttttgtggatgacgagacgattaactatcagctctttgaaaagatggttccctgggaagaaaaaggttttttgatcgcgggaaccgcggccgacggcctggaagcgcttcagatgtatgagcaggtccagcccgatttgatcttcatggatatccagcttccgctcatggatggcctggagtgtgtccgctgtatccgggaagagaatcaggaggtccagatcgtgattgtcagcgcatacagcgacttttcgtatgcacagaaggcaatccgctacggcgttcaggattttctgttaaaaccggtgagccgtatgatgttaaaccagcaggtggataagattaaaaagacgctggatgcgaggaaacagccggatagagccctggatctctattccaatccgtacgtggatgagatgaatcaggtgttcgcctgcatttctcagaatgcggatggccagatgccgccgcttaagtacctgccagaattaaatgctgtatattgccagattctgcgcccattttccggagacgggggaccggcggcaaagcttaaggagctgtcggcagagctggctgcggtaagtgacggctcacaggggctgaatgcggtttttattctgtcgggaacctccctctatttgggatacggcggcgcggcgccaggagaggcggcggttcagaccataaccggattttttcaggagcacggatacgctgcagagctttacttatggaaacagggagaaggttcgtggagtctgtgcgagtttctggcgaggtcccatacgctggagaactacggtttttatgaaaaatacggcagagcctatgagatagaagaatatccatttcaggagacggagctggacactgcgccgttagacggactgatcgtggaggcgctggcggagaacacgccggagaaactgctggattttatagacggtcagttctcagcagccaggagagggctggtctcaccccgcctcttaaagaatttcgcgctggatgttctcgtcaaaatgaagttctgcttaaagaagttcgctcccgaggaatcgttcggccttatgaggaatctccgcatggagaagatctatgataccgtcagctgcgatgctctgaagcgtttcgtatgccagagggttgaggatggttttaaagaactggaccgcacgattctccaggccggcaagggggaacagattgtatttaaggcaaattcatttgcggagctgaaattttcggacccgggcttctcggtcctcatggcggcagactttatcggaatcagcaaaaactattttaccagcctgtacaaggaaaaggccgggatcgggtactgggactatgtcacaaagctgcggatgcagaaggctaaggagcttttaacgaccacggaggataccatcggagccgttgccagggcgattggatatgagagcgagtaccatttttcacggaaattcaaagagtatacagggcagtcgcccaatcggtaccgcaggcagcagtaaccctgcatagtagttttgagcaaaggaaccgtagtttttggcaggaaccgcggccgtacctgctgataagaagcaaagatccccgagtattacgcatttagaaatgggccctggaaggatataatggacttatcaaagaaaagggagggttcctgaaatgaaaagaggagcattattcttagcaggtgtattaacagtatcggcgattttaaccgcctgcggcggccaggaaagcggcggttcggccggttctaaggacagcgctgcagcggagagcacgacggagggcaaggccaaagattccggggaaaaggttactatcagcctattatcctggaatacggatgagatcctgggagagtttattgcaggatttgaacaggagaatcctaatataaaaattgatcttcagtacgttcccccagtgcagcagtatgtggacaaattcagtgttctggcggcttccgggcagatgactgatatgttctatatcgcggcggagaacaagcaggaggtaataagcaaaggggtagcggaagatatcagcgatatggagatattctcaagaattgatccggcgacgtcggcgacctatgggaaagacgggaagatatacggttactctccggatgcatggattggaggaatcttctataacaaagatttatttgaacaggcgggaatcgaaaaagagccggagacatggcaggaatttgtggactgcgcggcaaaacttaaggcaattggagtggaaccgtatctggatgatgccgataatgtccataatctggctcaggatttataccagtgcagcgtaatcagccaggaaccgtacgcagatgtccagatcaatgaaggacggtcaacgtttcaggaaaaatacacagaaccgcttaagctctggtatgatgatatgattgcgggcggactctatagccagatggcgcttggactgaacagcgaccaggtgattgatatgtttgcaaacggcgaggttgccatgatgcacggaggtccatggaacatagccacaattgagcagaagaatccggatatgaattacgacattttcggactttctgacagtaacggaaaccgtgttctccctggcgctgtgaatgtgggattatccatcagtaccacttccgcgcataaagatgcctgccgtgcatttatcgaatatatggcaagggacgaaaatattgtgaaatggcagaaggttaccaataatgcgattatcgtggaaggaatcgactataccatgggaaccgtctttgagaaattcaaagaagatgcggttacgggcagtttctatctgcctcagattgtatggaataattcctccggtatttacaaggaattcttatccggtatccaggataccatcacgggagctgatacgattgaaaatatacctgtgagacttgatgaaaaacaggcggagttaagtcaatagctttcatcgtgtaagagctataaaagggtgctgcaaaaggaacatgcccttttgcggcaccctttttctacccatttttcaggaaaggatgattaaaatgaaggctaaactgagaaaagaactgccgtacctgctgtttattcttccggcgtttattgtatacacgatacttacagtaataccgctggttcagacactgggcctgtcttttacaaattgggatggatattccatgagcaacttaagctttaccggacttaaaaatttcaagctggtatttgcagaccggtctatgaagacagcgcttttgaatacgtgtttttacagcatcgtatttccgttagtgactactgtatttgccatcccactgtcgctggtgcttaattccgggatgaagacgaagaaccttcagagagccgtattctttttcccgtcggttcccagcgccattattctgggctatttatgggcctatatcctgtcgccgacgggcaacgggctgttaaataagctgctgggcctgttcggaatcaatccggttatgtggctggcagttccgaaatgggctatgttctctgtactcctggtaaatttatggagcgtcgtcggctggcacgcctgtatctatctggcccagcttcagagcatccccactgagtattacgaggccgccaacgtggatggggcgactgcatggcagaaattccggtacattacatttcccatgctggcctcggccatgacggtgagcgtcatgctgctgctcttaaattccatgaagctttatgatctgccgtttgcactgaccagcggaggccccggcacgtcgacgacactcgtctcgcagatcattatcaaaacaggttttgtggaaaaatcctatggaaaggcgactgccatgtcgacaattttctttgtcttcattgcgattgtcagtgtgatccagttaaagctgatgaagaaacgggaggtggagtaaatggtaaaaaagaggaaagtaaaaagtattctgggtgaagcggcaatgctgggagtctgtgtgatcttctttatcccgttttattaccttctcgtcaacacgttcaagccggccagggaagcgaccgtgtcccccctctctcttcccattcagagttttaccctggatttatacaaggaggcgcttcacacgatcaatttctggagcagctttggtaattcaattctgattacggtggtatcggtcgtgattatcatttccattggttccatggcttcctacgccataagcaggagaaaaaacagactgacccagtttctgttcttctactttctggttggttttatggttccggtgcagacgacgctgattccgctgtttaacttaatgtcgtctctgaagctgcagaactcggtggcgggtatgattgtgctgtactccagctggtgtaatttcgccatgttcatgtatcagggctttttgggcggagtgccgaaggacctggaggaagcggccctgatcgacggggccaatctctggaaattattctggaagattgtattcccgctgctgaagccggttacgactaccattgtgatctttgatgtgatgtggatctggaatgatttcatgctgccgtatttatttatcagctcttcggataagtttacgctgattatggaggtgtataagggcgtcgggcagttcgccaataactggaccgtgatgctctgcaccatggtgatcgtgctgatcccaattacgattttctatgtggcgatgcagaagcatattatagcgggaataacgagcggggcggtcaaaggctgagttcgcctgagtttaccgccgcgtgacggggctgtactcccgtaactctgagtatcaggagactgagggggtacgcgatgagaacaggaggttgatggaagatggaaaacagagtgataccccaggcaccgctgtttcgtgatccgatttacgacggagccgcggacccggtgattatctggaacagacaggaagaaagctggtggatcttttatacaaacagaagggcggcaggggtgaaccatggagtttcctacatgcacggcagcgatatcgggattgccagctctgctgactgcggcaggacgtggacgtatcgcgggatcgccgggggcttagagtatgaaaaaggaagaaatacatactgggcgccggagattatcgaacacgaggggatttaccatatgtatgtgtcgtacgtgagagggattccgacaacgtgggaatgcccgcggacgattctccactatatcagcgagaatttatgggactggaagctggaagggccgctttccctctcctccgaccgggtgatcgacgcctgcgtggtacgtttaccggatgggacgtggaaaatgtggtataaggatgaggttcatgacagccatacctatacggcgttcagcgaagatctttaccactggacggcgggcggaccggagatcacggactgcgcccatgaagggcccaatgtatttttctttaaaaatcattactggatgattaccgacccgtgggaagggctgggagtctaccggagtgatgatatgaagcattggacgcgctgccccaatatactggcacagccgggcagcaggaccgatgacggaacgatagcggcccatgccgatgtactggttcataagggcagggcttatatattctatttcacacacccggaagtgagccgggaagaacggaacaacccggattttgtctgggaatacagacacaggaggacttccctgcaggccgcggagctgactgtggcggaggatcatctggagtgtgacagggatcgtgtggagatggatttgggggcagaaggatagaggacagagacagccataatctgagaaaggtttatggctgtctcttttcctatcacttaggaaaaaccctgtttgcactgaaaatcaaaatcaggtacactctagttacaatattaaggccttaagaacaaaccacaaagggggaaatttctttatgaacgagaaaaccacaggttttcaggacaagcttatgaagtacatgatgcccattgccaactgggtagagaaaaacaactggctccaggcaatcaaagacggtatgatcgcggacattccggtcatcatcatcggatctatctttcttctgccgatcgcgctgaacaacttaatcgcttccgggccgatccatgattttatctccgcccatatgggcgtgctgacgtatgcggccggctttaccaacgatttactgtcaatcttcgcggcgttcttcattgctacggctttggcaaagagatacggtgtccacaatacacagaccgggatcacggcgatcatcgttcatctgatcctttccgccgtttccatcgagggtggaatcagcactgagtttttaggtgcttcgggcctctttaccagtattatttccggtattatgagtgtggagattacacggtttttaattaagcataatgtaattatcaagctgccgtcgtcagtgccgccaatggtaggagagagctttgcctccctgattcctctggtagtcaatgttattgtggcagttgccatcgctaatatctcgattgctgttaccggacttgcattcccggcagctattatgaagctcttagctccggctatcaacaccatggatacgcttccggcactgctgatcgttatcttcctgacacagtttttatggtttttcggccttcacggaccgtccatcacctctgcggtgtgggctgcatttgcaatcgcttaccaggcagaaaatatggctaattacgcatcgggtgctccggttacccacatcttcacctatggactctactataatttccttcaggtagcaggttccggattgacattgggccttgtcttatttatgatgaagtcaaaggcgaaatcgtttaaatccatcggtgtggcgtcactcgttccatctatcttcggaatcaatgagccggttatcttcggcctcccgattctgctgaacccgtatatgttcattccgttcgtattcgggccgctgctgatcactgtgcttacatacttcagcatgaaggtggggctggttggctatccggtggcagcgcctccaggattcctgcctccgggcgttggtgcgttccttacaacgtatgactggagaagcgtggttctcgtatttgtatcactgatcatcatggcactgatttattatcctttctttaagatgatggaaaaagacgaactgaagagagaagctcagagcgaagcggagtaaacagaacatggtatttacaaaaaggcagacagagattatagagtatatcatgaataatgtgtcaggaatcacgggtgataaactgacaaagtattttggggtgtcgtcgcgaaccatcaggaatgacatccttcagataaactcggccttaagcggcagtctgtctctctgccagacggaggggcgaacggcatacccctccataaaagcctcgaaacgaatcggttactatatcacacaggaggatatggaggactttcgggcagtgttagagggaggcgatgacagagcctgggtcatcgctccccataaccgcggctacgcgattctgggccacgccctggagaacggaagctgcaatttatacgatctggaagaggagctgttcttatcccagacagcgcttcgggaagaagtgcagaagcttcggaagatgctggaagataagatggactggacggtcctgtttctggaaggaagccaggtccggatcgtggaaaatgaagaaaagatacgattatctatttttaacattatcaaatatgaagtccagactcatacggattttaacagtgattatctgggactgatttttcgcggcgaatatgaccgcggggagtacgaaacttttgtaaatgcggttaaaaactactttggaagccacgagattctggtgtcagacgccagcctttacatggtggccaacgctatttatgcgaccatcatgagaaagcgccagggccatgagctgaccggcttaaaggcagaggagttcgtggtagaggttctgaccaatcttttgtaccatttgaaggcgcagaaggtggaactgaccgagagcgacgaagcactgcttaagatattcctgtattccgtaaggctcgtccagagcgaggagaatacgagggccagcgctttgagcggcgtcatcttaaatgagttctgccaggaagtattaaataaatacagctttgacttacatcagtccgacgagctgttcaataatatggcgcttcatttagagtatttaatccgccggatcgatacgggctaccggatcgataacccgattctgcaggacatcaagactcagtatccgtatgcctacgaaattgcgattcttctcgtaccgatcatgttcaagtacaagagtattcccatccgcgacgaagagattgcctatatggccctgtacgtggcctatttcctggaaaaggtaaaccggcggttaaagaccgtgatcatcaacgctccgagacagagtgtctgcgccatggtgtgcagctggttaaatgatcatttccagaatcagattgagatcgtaaaggtccttccgaagcaccagctggaccagtacgtgaaggaccatccggtggacttggttatttccacggaagggcagagagtgaatacggagattcccgtattccggatcaatggaattgcaaaccagcaggactactcggcgctaaacggatttatcagacgcatgagggtgagcaggcggttcagtgtcatcgtcaacaaatactttgataccaggtgtgtcaagatctttgcaaaggacggcgggaccgcaaaatggaacggcagtgtttcctttgaaacggttatcgggacgctttcagagaagtttaaagagcagggtaagatcgagtcaatggaagaatacgtggaagacgtactgtcgagggaagtcaattatcccactgtgatcggagaatccgtgatgattccccatccgctcatgacgtttgcgaaggagaccgcggtagcggcggctatcttaaaaccgcccatcaccgtctgcaggaaggcagtgaaggttatcttcctcctggccattgagggacggcccaatgacgacgtgagtattctgtttgagttcttcaaacaggtggccatgaatgaaaatctggtacacacgctgtatgaggcggcggatgaaaaagactttttaaaccgtttgatcagtatatccacttccattgagcttttttaagagtgggttttgttgatagaaattttaaaataaagcagtaaaatacaactaaagtttgaacctgacagaaaatatagattgaatagaaggagagcaagtaaaaatgagtgagaaaaaattttccgtagttatcgcaggaggcggcagtacgtatacgcctgagattattctgatgctgttggataatttagacaggcttccgcttcgtgccatcaagctgtatgacaatgacgaagagcgccagggaagactggcaaaggcctgtgagatcattgtaaaagagaaagatccatccatcgaattcgtagcgacgacagatccagagacggcttacacagacgtcgatttctgtctggcacatatccgcgtgggacagcttcccatgagggaaaaagacgagaagatcccgttaaagtacggcgtagtcggccaggagacctgcggaccaggcggtatcgcttacggcatgcgttccattccgggcgttctggagaacatcgaatacatggagaaatactcccccaactgctggatgctcaactactctaacccggctgctatcgtagctgaggcgtgcagacggtttaaaccgaacgcaagagtcatcaatatctgcgacatgccgatcggtatggagaacaacatcgcaaagattctgggctttaacgaccgcaaggagatgacggtgcgctacttcggcctcaatcatttcggctggtggacctccatcaaggacaaggaaggcaatgagtatatcgacaaattgatcgctcatcagttaaagtatggcaacacgcttccggaagagggaaataacggagattacacagacaattcctggtatgagacggctaagaaggtgaaggatttaaccgcgatcgacccgaccatggctcccaattcttacttccagtactacttattcggcgacgacatggtagcccataccaatcctgagtatacgagagccaatcaggttatggacggaagagaaaagcgggtattcggcgagtgcgcaaggattgcagaggccggtacggcagagggaacctctttggagatcggtatccacgcatcctttatcgtggacttggcgacagcactggccttcaatacccatgagagaatgctgctgatcgtaagaaataacggcgccatcgagaactttgataaggacgccatggtagagattccgtgtatcgttggaaaagacggatacgagccgatcaccatcggaacgattccgaccttccagaagggacttatggaagagcaggttgcggtagagaagctgaccgtagacgcttatgagcagggaagctaccataagttatggcaggctctgaccttatcaaagacggttccgagcgccaatgtagcgaagaagatcctcgacgattacatcgaggcgaataaggaatactggccggaattaaagtaataaaaatcgtggaacaaagtcaaaataagcccgggaaaattaagaaataaaccctcggggcacatagtaaatgaggaggcaatatgagaatattaatttgctgtaacgccggaatgagcagttcaatcattatgcagaagatgagagatgcggctgcaaagcgtaatatggagcttacctgtgaggcggtgccgaatgcgggaatcagtgatgaaatcggaaaatgggatgtgtgtctggtagggccgcagctggtttacgcggtgaacaatatcaagagtatcttaaacataccggtagcaagcattgaaccgagggtttatgccctggccgacggcgacaaagccctggattttgcgatcgaactggctaaaaaatcatgagaaaggcttaaattatggctgatgttacaaaattatcggagtgtgcaatgcagatcgtgacctacgccggctgcgccaagtccagctatatgcaggcgcttcaggaggccaagaaggggaactgggatcaggtggaaccgagaattaaggaaggcgaacagttctaccgccaggcccacgagcagcacggcgagatcctgctaaaagaggtgaacacgctggaaccccagattacgctgttaatgtcccacgcagaggaccagattatgtcggcggaactggtacgcgttctggtggaagaattgatcgaaatatatacgaatcaaaagaatcagaagggagaatgacgatggcaaattatacgatatgggcaaatgccacgacaaagaatggatttgcggcagatgagatcatctcctgtctgcagaaagcgatccggcggggaatggtggaggaggcatgccagtacgcctatgaactgtatacctccggcccggctttgttagagaaggtttggcatcgtctgctcacgatttcggtggaagacatcggtttcggcgatctcgatgcggccggaaagatcaatacgctggatgaaatgcggaagaaattcgcttacgacgacggcgaccagccgatgtactttatccatgcgattcggattctctgtgcgtgcacgaaggaccgttccagtgattacttaaagaatatcatcatcaaagaagcggctatgggcaaggtgcccgagattctcgatgtggctttagataagcacacgagacgcggccaggagatggggcgcggatccatccatttctttgaagagggagcaaaggtaatcccgcagctggatgtggataacggatataaggagagatacagaaaaatcctggagaattacgatccgtctaaggcggttccgggagcgtttgtttatagttcggggagagattaaatagatgataggaaagggctgtgtctgtatggtgaaaacctcagacatggccctgatttcatccgctgttttctttgttagtgttatgacagattgatattcttttatgtatcgaatataataaatgttatactgtaggttcggtacattaataattcattgatgatatacagcggaggtaaagtggtatgatccctgatgaaattttacaacttataagcaatggagaaaataacataaaatgattccatttggtgaaaagcatttgaatgatctgttcgtgatggatggattgcaaagtgtcagcgcaagagataaaattctgcgtgaaatcgtatcaaacagcctggcacatcgggatttttcaaatgcttatgttgcgaaaatggttattgagagaaaccaaatttttaccgagaactgtaaccgttctcatggttatggaagcctaaacctttccaactttgctccatttccaaagaacccaccgatttctaaggtatttcgtgaagttggattggcagatgaattaggatctggtatgagaaatacttataaatatacaaggttatactcaggaggagaacctcaatttatcgaaggtgatatattcaggaccattattccactcaatgaagccgcaactggaaccgtaggaccattttcaattgttaaaaaaggtgaagttagtggtgaagttggtggtgaagttagtggtgaagttgaaagggctgttctttctgaagttaaactggatatggagcaattaaaaagtcttttagatttctgtaatactggtcgttcgaggaaagaaatgcaggattattgtggtataaaggcacagagttatttcagagatcatattctgtcacctttgctgagatacggattgctccgtatgtctattcctgataagccgaaaagttcaaaacagaaatatatcagaaattgaatttatcaggatatcaggaaaattacaaaaaacgcttgcaaaactcgaaaagaccagtaaaatagagaaagacatattatttacgcgaacgcaccagattacagaccagtaaagaataaaaagataacggagtgagacgtatggcactgaaaaagaagccggtaaccggcatgaaagatatcctgcccgcagagatggcggtacgggactatgtaatgaaccagattcgtgagacataccgtggattcggatttacttccattgagaccccgtgtgtggaacatattgaaaacctgacgagcaagcagggcggcgacaacgaaaagctgatcttcaagatcatgaagcgcggggagaagctgcgcctcgatacggcagagacggaaaacgatttaacagacagcggactccgctacgacttaaccgtgccgttatgccgctattatgccaataacgcggcgtcgcttccggcgccgtttaaggcacttcagatgggcagcgtatggagagcggacaagcctcagagaggaaggttccgccagtttgtccagtgtgacattgatattttgggcgatcccagcagattagcagagattgaactgattcttgcgaccaccacgctgctcggtaaagttggcttcaagggataccacgtccgcatcaatgacagaaatatcttaaagggtatggctgcttactgcggattcccggaggaatcctttgaccaggtatttattattctggataagatggataagatcggcatggaaggcgttgcttctgaactttccgaggccggatacgaaaaggacaagatcgaccagtatctggcgctgtttggttcggtgacaccggatgccgcaggtgtccgttctctcggagagacgttaaaggatgtaatggaaccggaaaaggcggaaaatctggctgctatcatggacagcgtaaatagcatcgccaccagccagttcgacattatattcgatccgacactggtgcgtggaatgtcctactataccggaacaatctatgagatccaggtagacgggttcccgggatcggtcggcggcggcggccgttacgataagatgatcggcaagtttaccggaatggagacaccggcctgcggcttctccattgggttcgagagaatcattaccatcctgatggaagagggatttacgattcctggaagcacggagaagaaagcattcctgattgagaagggagtcagcgctgaagtcatgacggcggcgattaaagaggccatggacgagcgggccaggggcgtttccgttctcgtttcccaaatgaacaaaaataagaagttccagaaggaaaaccttcagaaagagggctataccgagtttaaagaattttacagagaaggcttaaaataaaaaagcctgtttcagaaagcaaggaggcatattatggcagaatcaatgctgggactgaaacggtcccatagatgtacagaggttacgagcagcaatgtcggtgagaccgtcaccgtcatgggctgggtgcagaagagcagaaacaagggcggtattattttcgtggatttaagagaccgttccggtattctgcagattatctttgaagagagcgactgtggtgcagagagctttgcaaaggctgaaaagctgagaagcgaatttgttatcgccgtgaccggacacgtggagaagcgtgcaggcggagtgaacgagaatcttgctaccggtgatatcgaggtcagagcagagagtcttcgcattctttcggagtccgagacaccgccattcccgattgaggagaacagcaagacgaaggaagagcttcgtttaaaataccgttatctcgatttgagaagaccggatatccagagaaatatcatggtcagaagccaggccgccatcatcacgagagcatttctggcagaggaaggtttctttgagattgagaccccgaccttaatcaagagcacaccggaaggcgcacgcgactatcttgtaccgagccgtgttcatccgggttcattctacgcgcttccgcagtctccgcagttatttaagcagctgctcatgtgctccggctatgaccgttatttccagctggccagatgctaccgcgatgaagacttgcgtgccgacagacagccggaatttacgcagatcgatatggagctgtccttcgtggatgtggaagacgtccttgatgtaaatgagagactgttaaagagattatttaaggaaatctgtaatttcgatctggagcttccgattccgagaatgacatggcgcgaggcgatggaccgattcggctccgataagcctgatctgcgttttggcatggaactgaagaatgtgtccgatgtggtccgcggctgcgaatttgccgtatttaaaaatgctctggaagcaggcggttccgtgcgcggtatcaacgctgacgggcagggagccatgccgcgtaagaagatcgacgccctggtggagtatgcaaaaggcttcggggcaaagggactggcttacattgccatcgctgaggatggcacttacaagtcctcctttgcaaaattcatgacagaggatgaacttcacgcattagtggaagctatggctggaaagccgggagatttgcttctctttgcggccgacaaagataaagtggtatttgacgtattaggaaatttaagactggaactggcaagacagcaggatttgctgaaaaaggatgacttcaagttcttatgggtaaccgaattcccgcttcttgagtattccgaggaacagggacgtttcgttgccatgcaccatccatttaccatgccgatggacgaagactggcatttaatcgacagcgatccgggggcagtgcgtgcaaaagcctacgatatcgtgttaaacggtaccgagatgggcggcggctctgtccgtatccatcagggagatatccagtccaagatgttcgaagtcctgggctttaccccggagcaggcgcaggaacagttcggattcctgcttgacgcattcaaatacggagttccgcctcacgcaggtctagcttacggcctcgaccgcatgatcatgcttatggtaggtgctgacagcatccgcgacgtaatcgcattcccgaaggtgaaggatgcctccgacatgatgacagaggctccggctccggttgatgaaaagcagctggaggaactggggattgaggtttcagagacagaagaatgagagactaaaaaaatagcagaataaagagagcagatatagatacagacagcccgcatctcgcgccggtaatggcgccaggatgcgggctattattgtgggtcggatagacccagttgagtgcgcgaagcgcgcgaaatagaaaccacccgctatgcgggtgcgcggtgttggttataccaaaaatcactcagcctgatataatagaggtgtccaagccactattaaaaaggagagtgattttatggcgaagaaagccaatgaattagcgcatacaaagtggatgtgcaagtatcatatcgtcttcacccctaagtatagacgaaaagtgatctataatcaatataaagaagacctgagagatatcataaaacaattatgtaattataagggtgttcagatactggaggggaaattaatgccggatcatgtgcatatcctggtgagtatcccacccaagataagcgtatccagttttatgggctatttgaaaggaaagtcagcattaatgatgtttgaccgtcatgccaacttaaagtacaagttcgggaatcgtcatttctggtcagaaggatactacgtaagcacagtgggattaaacgaagacaccataaagaagtatatacaagatcaggagaaggcagatatcatgctggacaaattgagtgtgaaagaatatgaagacccctttaggggttagtcggtattcagatagccccttgaaggggcggcaacagaggtaaaagcacaaagtggcttgaacgaagtgaaagccagcgccttgagacgctggcctagtaacaaaggcttatagccgaagcgcgagccacccgttagacgggtggcagcgacttgttaatccaggttatttatacgagatacattgcgttggtagcgatgaaaagccatgtgaacaggaacgtattgacgaaagtgctgagataaatcttgcctgttctgacgtaacaccaatgagtaacgataccaaaaacagggagaacaggaagcatataaaggattggcgcaaaggcaaagcgcccccagtgaaacatggcatttcctgttaagggaaagcttgaaaaattcagaagcagaagggcagcgaaacctgcggtattgaagaaaacgcagttaaataaaggatttaagtgccctgtcttaaaatacagatattttatctggaacatcccggtgcagaaaaaataaatcataaatacaggaaaataggagcaggcagctaatgctttacgcggattaaaagtcgaaaaatttgtgcaaaacagacttatatttgttccaaacaaccatttgacagttaagttgcatgcatagcagcaggcaaatacgcaggcagcctgcaaaaaggcctttaaaatgcctccaaatcgttcatttaaaagtacagataatgctaccgccggctgaactctccgatccagtaaacgaataaagaggagacagaggcatgagataaaggcagcccaaatggccagtccattggaatcggactgtggaaaaagcatggtaggttccagaatctttttcccaagcacatagaggggaatataagcggcagcgcccagaatcgggcttaaccatagtaaggatactgaaaaaaaactgcctttttccaatgaagcatcggattccggaaaattggaattgatccggctcgtgtgcaggagcgctgataatactgcaaacaaaagataaaacagcccgaataagcttattgccttaccgagcatggcagcaggccaaatctgaggaagcggcctgactgctggagttcccatagttctcccgaaggtatccacgatccgctctatgacttcaaagctgaaatgatatccaaaattggtagtgttggccagatatgctgttttcgtataggaattctgctggtttttgtaagtgatgccattttcaacaggaccttcaagggagaaaatagcctgaagcataggagattccagatccttaccgggattaatcgtatattctccgtatttggcgaaaatccaggtacagtgaaaatctttgtcacctgtcatgatctctccggaaccattcaaattaataaaatcgccgcagataagagaacgaacaagttcagggtgtactgcagcagcctggcatagataggaacctccaagtgtatgtccttccatgccgattcggctgctgtctacgaaactcagttccgcagtatatgtgagaatggaatccgcccccatcgtatctgtcgcggcaatatcagaagttccatgcttatatggattaaatgtaacgacaacgtatccatttcttgccagctctgtgttgactgcctcatgcatgatatattcattgtttcctcctgagcaggtgatcactgcaggtgcgggagtggtactgctggcatctttagggatgtacatagtgccgtttatcttcattccgtctttggttatgtactggaaatcctgtatttttatctgaaaccaggaagtactcactgcatgggcaaacagcattcctgtaaatacgagaaccagcgcgagtataagtttacggcagatatggtttctcattgcgaatctcctttcatatcccggtattgtccaggagtaacaccgtaatattttttgaaaaccctgtaaaagtagtttacactggaataaccggcaaggctgtaaatgtcagtaaccggtatgtctgtctcaagaagcagggaaactgctgctttcatccggtactgtgtcagcctttctatgatattggttcctgtcaaatctttataaagcttactgatataggtattggataaatttagatctgtggcaatctgcagaacaccgtaatcacaattctggtaattcttttcgatcagccgctctacctcatcgatgtagccctgttgtctctgctggtctgcatgttcatacttctttttaataaactgtacggtctgaagaagcagcgcatcgatttcctctgtagtttcacaattatcaaatatcagatgctcacgcatggcttcgtggtatgccatttttttactgttttccagaaccagaagatcctgttccaactgacttctcacggaaagcagtgcagtttggtaggcgagccagtctccggtatactgcttgaggagattggaaaatgcatctggctgctccagacttccgtgaattaaatggtcattcagcttttttagttcttctataaactctgattgagaaaataacatggcgtcagattccgcctgaatttgaatcagactgttccagccggtaaaaaggcgttggtgtataccctgcatgcattctttgtaaataatatccagatgctcaatcgttacagattctggttgagagacaattgttactgtaaatcccgtagcctgaaggatttttgattgtgctgatatgaaaagtctttggagagtctctttaccagtttcaggttttgtgttatagatgacaataacatattttcggtcaggacttatgattgtaatctcccggtaaagttcttgcatctcatcagtaataatggcctctacagtgctcagaagttcaagctgctgagatggtgttttctgaaagaaaattctgtaacggtcaataaagaccaaactcagtcccaaaggagttaaaagatccagaggcagatattccttcaacggtaagtgggacagctcacattctgatttgccgtatacacagagttcatataaaaattttttgattaattctgttttggccgccttttcagctgctgataaatcttcattttcatccatgatcatttttacgggccgataagccagaacacagctgaaaaagaagctgactgaaaagataatcagagcgatggaaacggcattggccacaaaacggtagaactctgaatcaaagtatgcttccttcatatcagcacttagaatgaggctgattacgactgcaaaaaccaggatgcagagagatgaaaaaagagcaaatggaagaaagacttttaaataggcatgatggtgcttttttctacgtttcaaatacattcccccctccataagatctccagtatagtgtaatcaattatgatattttagacaagtggtgacggcaaagaagagaaaaaaagataataaaactaaatttgtacaatcgataaaaagaaatttggttaagcagatcagatatgtggaatggacaccggcatttgactgtggttgactgaatacatcgggttcggcatttacaccggcctgtaaaaattattcatttatgaggaggttcactatgaaacggtggaacaaaaggttggttatgctggcagcggcgattctgcttatgacagcgggaacgctcttaaacgtggccatcagtaccaatgggggaaatgtcaaggtacgcagagttacttattccgatagctacggaaatatggtaagcggtattctctatattccgcgtactgcaaccagggaaacgccggcaccggcagtgctcacgaatcatggcggtggtgcatccgccgaagcacagagttcttataatgtggaactcgcaagaagaggatatgtggtactgtcatgggatgcgtcgaattcgggaagttcagaggcaagtccggatgaaacacacggtggagaggcgtcctacgcatttttacaatctgtagattatgtacagaaggatcagctgattacatcaggccattctatgggcggcgtctattcttttatggttgcggggaatcatccggatcatgtaaaggctgaaatagcagttggaatgaatccgggtatgaatgacacggaaaattttcataccaattatgtctgtataattggaaaacatgatgaaagcaatctggttcgaagtgacggaaatattttgaatacggcacataacgaactgtaccacaacttttttggcctttccgatgatgaaactctggaagtcggaacactgtacggaagttttgaggagggtactgcaagaattttttacatgccgaacagctctcatgccggcgctatggtcaatcgtgagctgcttgcgcaatacctggaaactgtaatgacagcaacgacagctcctaatccgatcactgcctctgatcaggtatggatgttcaaggatataggaatgataattcaattttcggggctgattctgctgctgtttgcgtcagcttctctgctcctgtgtacgaaactgttttcagcactgattctgccggcccgcagaccggtaggatttcagagaaacagtttgatgtggtggatttctattcttcttttactgtttttgcctgcagtattgtttataccaggtactacactggcacaaaaatttgatgtgacgagcatattaaagctggataatacggcaaatggttttgctctctggagtctggtaactgcctgtatcgtattactcctttttttgctttaccattatctgtacggaaagaaagtaggaggcaatttaatgacttatggcctctctacggcagaaaacgaaaatagggtacatattgcctatattttaaaagcacttttgtttgcctgctgtatagtcggaattacttatgcggcgtatctgcttatgtattatattacaggaggagatattcatatatggctggcgtcaattcgaccggttacatatatcagaatgccgtattatccggtctacttcttcctgcagattccattcttcctgttttcaacgctggcaggaagaagcatcagcttaaataacggagaaagaacaaaaggttccggtatgcgcaattccatgatattaagccttttgttcggagtactcggacttggtctgctgttccttgtatttaatattgtattccgtacgacaggaaccgtactgttcccaaagaacagaggctacatctatgccggtgcaattttttcaatgatacctgcatttgcggtcagcaataccattaactgttacataaccaataaaaccaacagtatttatgcaggtcttttctcggcggttatgtggtctacgtggattatgacagcagccaatgcaattgcatagaaaaagaaacagctatacaggaaaaaaataagaaaacaatacccatattttacatttatctgttataataagcttaaaggtaaaaaatgtaaaaaaggaggctttaagaaatgaaaagaagcggaaaaagaaggttcctgtccctgtggctcgcgctgctgatggtgctgtctctgaccaccggcatgtcgtttactgcagcggcggcagaccacgacatcgttgtgctgtataccaatgatgttcactgcggtgttgacgacaacatcggatatgccgggctggcgctgtataagaagcagatgctcgagcagacaccgtacgttgtccttgttgacgccggcgatgccattcagggcgcgccgatcggaacgctttccgatggtggctacctaatcgatatcatgaataaggttggctatgactttgccgtaccggggaatcatgaattcgattacggcatgccgcgtttcctggaactggcggcaaaactgagctgtggttactattcctgcaacttcatggacctgcggaccggacagaccgtatttgcaccgtacaagatgatgacatacggcgatacgaaggttgcccttgtgggtgccagcacaccggaaagctttacgaagtccacaccggcgtatttccaggatgcaaacggaaactatatctacagtttctgtgaagatgagagcggacagaagctctatgaccagattcagtccagtgtgaatgcggcaagggcagatggagccaattacgtgattctcatcggccatctgggggagaatggaaccacggagcgctggtcttctgacagtgtcattaagaataccaacgggattgatgccgtaatcgacggccattcacacgagacggttccatcaaaggttgtgaagaacaaagatggtaaagatattatacttactcagaccggtacgaagcttcaggatatcggaaagatgacgattaaaaaagacggaacgatcacaacagaactgatctccaaggtagaggcaggaggcgcttccaggggatatacggtgaaatccggagattccttaagcagaattgcaaagagagagctgggctcctataaccgctggagagagatttacgatgccaacagagataagattaaaaatcctgatatgctgacgatcggcatgcagctcactcttcctggcggaagtgctgtcacggaggatgggaaaaatgtggactatgataccgatcagttcatcaaaggaattcaggcgcagtacaatgagacgttaaaggcagtgctggggcacagtgatgtagatttgaccgtcaatgatccggcgacgggagagcgtgccgtgagaagtgccgagacgaatctgggcgacctgaccgcagatgcataccgcttcgtactgggagccgatataggcttatccaacggcggaggcatccgggccaacatagcggcaggcaatattacatacaatgacacactggctgtattcccatacggcaacatgggatgtgtcgtggaagtgaagggccagcagattaaagacgctctggagatggcttccagaaactgcccggatgaaaacggcggattccttcaggtatcaggcctttcctataccatcgatacctctgtgccgtctacggtacagaccgatgagaaggggaacttcttaaaagtcggaggcgcttaccgcgtaaccgatatcaaggtaggggaggaagccctggatgtaaacaggacctacacagtcgcttcccacaactatatgctgaaatccggcggcgacggaatgaccatgtttgccggtgcgaatattaccagggacgaggttatgacggatgtggacattctctccgcatacatcaataccaatctgggcggtaaggtaggcgctgattacggtgacccgcacggccagggacgaattacagtgaaatagcttatagaagcatgtacagaaaagggactgcctcacaattcgtgagcagtcccttttcccttgcctgcaatcaggctgtttctcatctcctggcctcttattcctattcctcttcccggatctcttccgccagctcccgcaccttatcccagtccaggattcgtacgcccttcggcacgcgttccagaatctgttcttcacacatggtggagattaaatgcatcaggtgacgataggaaatcgttaagtactccgcaatctcggtgtatttcacggacagcagtccgccgttctggagaagaagcagacaggcggcgccttcacggatggtatggctgcattttctgccggaagtccccccgttgaaaactttccggaaaaatggtacactggtagggacaaaacaggaacaggagagatatcatgctattgaaagaaccacagtcccgctttgaggagtactacagaatctatgaagagtccttccccagcagggagcggcggaccagggagcagcagagagacatactgagtcatccgtgccaccgtgtcagaatcagggaggaagacggaagcatgctggcgttcgtgagctattgggaactgccgggctgtctgtttttggagcatctggccaccacggagcagtgcaggggaaaagggtacggaaagcagctggtggaggaatgccttgccgaaacggacaagcccgtgtttctggagattgaacccgtgaccgaggacgatccgatgaccggcaggcgggcaggcttttatgaacgtctgggctttttcatcaatacgtttccgtatatgcagcttccgctgaaggaggaggaccatcccattccgctgtgggtgatgagttacggaaagcctgtgacaaaagaggagtttgagccttataagaatgaaatacacgagattgcctacgggacggcggattctgaccgtttccgtccggaatagagaacattgacagcgaaccggcgctgtggtgaatcaggggaagccgatgaatattaatgaaatagcaaagttggcgggagtgtccagggcgacggtctcacggtttttaaatgacggttacgtcagtgatgataagaaagaaaaaataagaaaagtgatcgaggagacaggttataagccctccgcacaggctcagacactgaggacgaaaaggacgaatctgatcggggtgattatcccgaagatcaattccgcgtccatcagccgtatggtggcggggatcagcgttgtactttccagggccggataccagctcctccttgccaataccgacaatgatgaaaaggaagaagtcaagtatttacgtgtgctggctgagaatcaggtcgatggaatcatcctgatcggaacggtctttacggcggcccacaaaaaagtcctgaaggaactggccgtaccggtggtgatcctgggacagagcctcgccgggtattcctgcgtctatcacgatgattatcacgcagcatacgatttaactactctgcttctcgctcatgggagacatccggcctgcatcggcgtgctggaacgcgatgaggcggccggaaagcgaagaaaggacggctttttagacgcggtgagagactccggagccggtacagaccgggtgccctgcgcggaaggcaaattcagcatggattcgggatatgagcagacgaagcttcttttgagcgcaaatcctgagattgattccatattctgcgctacggacagcattgccataggcgctgtggcgtatctgcgggaaatcggaagacgggtcccggaggagattcaggttgccgggattggagattcagagacggccagggtatgtgtgccaaggctgaccacggtccactactactataaaacgagcggggaagaggccgcgcgcatgctggtcaacatgctgagtgccggcggccagattcgcagagaagtgaagatggggtatgagatcgtatatggaaagagcacaattgttcagagtaaatgagtttgtatcagatacacgagacgaagccgggccggacactggaaagaatggtgtccggcccggcttattttcccgggaaggcagatcagggctgcgattccggccgctctgtttttaccggttgattttgtgcagattatacaaaaaaacagtttttgtttgttatattggacggtttacaggggaggacggaaggtatataataaaaacaagatatgagatcgatctcatataaataaccaatatatcacatgaaatacagaataactggtaaaataagaatgggaacaatttcataaaatccagaggagggtaattatggattacagggagtcagcaaaacaggttttcgaattgattggcggaaaagcaaatctgatatccgcagcccactgtgcaaccagactgcgccttgtggtggccgacgagtcggtctgcgacaaaggagccatagagaatgtggacggggtaaagggggtgttcagcgcttccggacagcttcagattattttcggaacgggtacggtaaataaagtctatgatgaatttatcgccatagcaggaattacggctgcatcgaaggatgaggtaaagcaggcggcggccaggaagggaaatccgttccagagggcgattaaggcgctcggtgacgtgttcgtccccatcattccggccattgttgccagcggtctcttaatggggcttttagaaggcatctgtaaggtatacccggcgcttgcaggatcaggcacctatacgattcttcatctgatgagcagtgcggcatttaccttccttccggtcctgatcgcgttcagtgcggcaaaggttttcggcggcaatccgtttctgggagccgtgatcggtatggtcatgatccatccggatctgctgaatgcatgggcagtggctggagccgagtcgattcccaccgcctccgtatggtttggcctctataacattaaccttaccggttatcagggccatgtaattccggtcgttatcgccgtgttttttatgtcgaagctggagaaaaagctgcacacgatcgtaccggagatgtttgacctgtttgtaaccccgctggtgacggttcttgtgacagggtacgtgaccctgactgtttttgggccggtcttctcccttctggaaaacggagtgctggaaggcgtgaaattcctgattactatcccgttcggcatcggttccttctttgccggagcggtttatgctccaacagtagtagcgggtgtccatcatatgtataatgcgctggaagccggactgttaagctctgccggaatcaacacctggatgccgattgccacagcggccaatgtggcccagggcggagcggctctcgcgattgcactgaaaacaaagaataaaaaagtgaaagagctggcgcttcccgcttcactctccgcatttctcggcattacggaaccggttatcttcggtgtgaacttaagatttatgaaatcgtttattgccggctgtatcggcggtgcctgcggagccatggtatccggtattctcggcgtaggcgcttctgcttacggaattacgggactgttcggattcctgattactaccgactatgtatggcagtatgccctggtaattcttgtggctgcagcagtcgccttcttcatttcctggtcactgttccgtgacgagaaggaggagaaggaagagaaggaagagaagaaagaaaaggaagaaaaagacgagaaagcagaaatcggcggcaacgctgaagaaaaaaatgtaaatgtaccttatacagtatacagccctttaagcgggaccattattcccatgaaggaagtaaaggatccgacatttgcctctgaagttcttgggcatggcgcggcggtgataccgtcggagggaaaagtctgtgctccatgtgacggcacagtggtcacgatctttgaaacctgccatgccatcgggctgatgtccgaagacggaacggagattctgattcacgtggggcttgataccgtgaaactgggaggaagatattttactcctcatgtaaagagcggagatgccgtaaaaaaaggcgatttaatgctggaatttgacgcgaaagccattgcggcagccggatacgatatcaccacacctgtgatcatctccaacagctatgcatatcagtcggtagaaatgagcacagagagcgctgtcagagcaggagatgccttaattacagtaaccaaaggatgaccgcatcgggttttcaaagaactgaagcgatgcggcgccagatcagaaaggagccggccatgaaccgaaccgccgaacatgagacaatggatccctaccgtttaaaacttcatttgacgcctcccgctggctggctcaacgatcccaacggtttatgccaatatcgaggcacataccatgcgttttatcagtacgtgccaggggatgctctgggaaggggcaaaaaatgctgggggcatgctgtcagcagcgatttaatccactggagagatgaggggatcttcctggaacccgaccgaccctttgaccgggacggcgtctattccggatgtgcctggactgatgaaaatggaattcatctcttctacacgggaaacgtaaaggaagcaggagattatgactatatccgcgaaggcagacgggccgcgcaggtactggtggagacgaaagatggaaaagaggctggagaaaagaggctgcttctgaccaataaagattatccggaggactgtacgcttcatatcagggatcccaaggtctggaaggagggcggaatgtaccatatggtgctgggcgcccggaagaataacgatcagggagcggcgattctctatgaatcgtctgatctgacggcctggaagtatgcaggagagatgacgagcgagattccctttggctatatgtgggagtgccccgactgttttgaaatggaaggaacagcatttttatccttctgtccgcaggggctgccccggggtgaatttgaaaaccagaatatttaccagtcaggttatgtccgcctggaagaggggatgtccaggcctcagacagtgaagaccgcgtcatttacggagtgggataagggcttcgatttttatgcgccgcagacatttgccgatgagaagggaagaagaatcttaattggctggatggggcttcccgacatagaggaagagtacggcaatccgacggtggcctctggctggcagcacgccctgacgctgccgcgggaaatcacgtatcgggccggccggctgtgccagatgccggttgaagaactgaagcttcttcgcaaaaatgaaagaaacgtggaaacgggagaaacctccgtcctctccggggggatctgtgagatagagattgatcagatagagactggctcctgccggatctgttttaaccgggatctggttctggattgcagggacggagttttcaccatggaatttttaaacaggaccggcgccggccgtaccgtgagacgtgccgaaatagacagacttgaagaccttcggatcatcatggatacctcggcagtcgaagtatatgtaaaccatggcagcaccgtattcacttccaggtactatccggaacccggtaaatccagagtcgtgattgattgtgggaatagcagaaacaggctgtgggatttgggctgctgattaaagcagcctcttttcttttgccgcccatctggtataatgaaaccatatgccgccgcaggcggtcacagagtaccggaggtgtggaaaggagagacgaaaaccatggcaaaatttacaattgtatttcacagcgtctgcggaaatacgtatcagattgcagactgcttttaccgagtgcttcaggagagagggcaggaggtggcgctttacagaaccgcggatgcctcctttgagtcgggggaaaggaggagtgatgagtttaagcatcttcaggctgcaattgacgcggtgccggtcatagaagaggcagctcaggttctgggaagcgatgtgctgcttctcggttctccgacttattacggatgcgtttcggcgcagatgaagacgtttatggattcctttgaaaaaatgtgggcagatgctcccacggccggtatgtatttcggctgttttacatcggcgggagacggctgcggcgggccggagctgtgtctgcaggtaatgaacacctttgcccagcatatgggcatggttcccatatcggttccctgtaatatcggaggaacggcgcagccggcgtacggaatcaaacacgtgtccggagaaaaggcggaccgggcggtgacggaagagacccaaacggcggtaaggaattatgcggaccatattctgagagtcatttcataaggggaagaaaacggagaaaagatacacaattttcaggaaaagatgttcttttttatgatatctcaaagaaaggattgaattaaaaacttccttgtgttaccatgagattggtcagttatttctacaaattaatacatattacaaggagggttcttataaatggatatccgctattcagctaatcagaaagattttaaacgttacacaacagaagagacgagaaatgaatttttaatcgagaatttatatgttgcaaatgaagtcgtagccgtatactcccatgtagaccgtatggttacactgggctgcatgccgactacggagactgtttccatcgataagggaattgacatctggaagaatttcgggacaggctatttcctggagagaagggaaatcggcattttcaacatcggcggagccggcaagatcactgctgacggcgaagtgttcgatatgaattataaagactgcttatacatcacaaagggaacaaaggaagttcttttctccagcaacgacgcagccaatcctgcaaagttctatatggtgagcgcaccggcgcacaaggcctgcgagaccacctttattccgattgagaaggctgccaagaagccgttaggcgctatggagacctccaataagcgtgtgatcaatcagttcatccatccggatgttcttgagacctgccagctttccatgggaatgactgtgcttgatccgggcagtgtatggaacaccatgccggcacacactcatgagagacgtatggaagtttacatgtacttcgagattccggagaacaatgtggtattccacatgatgggcgaaggaaatgagacgagacatatcgtaatgcagaatgaacaggctgttatcagcccgtcctggagtattcacgcaggcgcaggcaccagcaactacacatttatctgggccatgggcggcgagaatcaggcgtttgatgatatggatgtcattccaacaacggaactgagatagttagaacactgcaaagttatacccgggagcggacaggattttgattctgaccattcccgggtttttcttatcttaagctaataaatgagattcatcacaatcccctgcggaaaatctccatacttttcaccgaacaaattgatgcctccgatatgccgggcatctttttttatctggatcaacagcgagatgtaggggtgatcctggagctttaaatctttgatcgtcagccggggatcgatcaggcttccgtctaagtagctgccgttttcccggacggagaatgtttttaacagtccatactgggtgcggccgttaggccaggcggggggagtcaggcggccgcggcgggcgccgtaatctccgggggaacagtaggtagcgacttcatggccgttgatggagacggtgatatcggagggccagtcttccagaaagccgggcgcttcggaacagagctccatgcagaaagagatttcgtggagttctaataaagggttggtcaggttgggaaaccggtattccacgaagccctgctgaaaccagatcagctgtgcgtttccgcgcagaggcgagtagaaggtgcgggcgctgtcgtaggcgtccatgacgccgttctcatccgccagaccgcaggtgggttccacctcacactgatagtaattgcccacaggcatatccagagtgattgtattatcggccagatccgcgtccgcgtcaaatgtttccaggtgaaatgtctgcatactgcagatacagacgcgcatggaaccgtgcagtccgggctgggtttccgtgacgatcagctttgcctcttccaggatcttgatgtgcagcgcggtcgaggatacggggatggagaggatgtccgcaatttcctgcaaagagaggggcgtattttttaacagatttaaaatattgaggcggattggagaggataaggcctttccgatccggacaatctggtcgtgatgagccggattgcttaagtgaagctggatatcgcgttctccgatgatcttaaccggagctttttgttttcgtgacatgactggttcctccttttcttacattattttttgaatactgtaatttaaaaccacatatttattatataaaaaatgtaataaaatatcaagtgtaataaaaaactgacagaattattgttgacaatacataaaaatataggtaaatagcaaaaaatacttgatctaacatacaaattatgctaagataaattatgtaataaatgtggcgagacaaagaaacaacgggatagatcggggtaaggtttctctgtttaatacatatttattgtaattaaaacggaagcaaaattcaagtatgaataaaaagaaaaggagagggagaaatgagaaaaatgaagaaaatggtgtcactgactatggcggcggttatgactttgtcgttagcgggatgcggcggcggtggatcgacaccggagacgaaagcggcggaaccggcggagtccaaggctgagacaacggcggaggccaaagcggaggagacgactgcggcacagccggcgggggaaaagacgacgattacatttatcaacggctttaccggcggagacggtccgtttatgaccaagattgtagatgcgtttaacgaatcacaggaccagtactttattgagcagcttcaggatgcagaccattacacgaagtttaaatcagatgactttgatatgctgattatccatgcggactggatttccacctatcatgcgctgggccttttgagagaggtctctgacatctatgagaaagcaggcctgtcctttgaaaatgactggcatccgattactcaaacgtatgcaaagtacgatgacggtattttcgcattcccattagacttatacgcagagactttctattacattaaagagtatgtgaaagaagtaccgaagacgtatgacgatatgaaggcactgcgggaccagctggattctgagaactccggaatctatccgatgtcaattcctcttaccggcgatcaccagtgggcgtggatgacggctctcggccagtccggatgcaactgggtggaaggcgaacacattaagatggacaccgatgagatcgcagacgcatttatgaagattcatgatctgatctataaggatcatatcagtgcggccggcctgggtgataacgaccactttaatacatttatcaaagaatccaaggacaataccaatgtcagcgcagtgaccagtctgacaggtccgtggaattatacggcggccagggaggttctgggcgacaatctgggaatcggcacgcttcctcagctgtatggagacacgaaggtagttcctgccggcggccacaccttcggcgtatctgcaaaggtaacagacgagaagaagatcgatggtatcgcggcatttatgaaatttgcttatcagccggaaatcatgttaaactgggcagattccggtcaggctccgattcatttaaagacgatggaactggtaaaacagtctcctgacaagtatccggttgccaatgtaaactatcagatctttgattacgcgatgattcttcctgccatctataacatcagggaacaggtgaaatatgtcaatacaaccgtatggtccatggtaatccagactcctgatttaaagaaggaggatttaatggaagagctgaagaatgcgacggaaattgcgacggaattatctgaattttaatcgttagaccatgaggggctgccgcttatgaagatcataagtgcggcagccctttctgatgcaagctgcagggcagcagacaggaggttgtcatgaagaaaagaaaaggcactgcggtgctgtttattatcccctttctactgttttttctactgttctggctgatcccatttgtgtacggcatcgtgatgagcgtatccaaatacagtctgattcagggaaaccggggattcgtgggattagcgaactatatcaagattttattttcttcttccatgtaccacaaatcatttgtccaggggctgggcaatacggtaatttttgtcgtgctcactactccgtttctggtgtttggaagcctgtttctggcgcttttgctggaccggctgccggaacggctgaaggggattttccggacgatttactttgcgtcctattccgtttccgtaaccgcagtggcggcggtgttcgtctggctgatgaagggaaacggcggatattttaacaatatgctgatcagcatgggaattatcaagacgccgattccatggatggagcagcagccgttcgtatgggtggcgctgacggtagccacggtctggtggacgatcggttacgacatgatgctgtttgtcaacgcactcaatgaaatagataccagtctgtatgaggcctctgccatggatggcgcagggttctgggtacagttccgatatatcattcttccgaatatcaaaaatgtatttttctttgtcctgatgacaacgattatcgcctcctttaacgtctacggccagccgaggctgatgacaaaaggcggcccgggcgagacgacgaaaccgttgattatgatgatcacctctacgattatggaccgcaacgacttaggtgtgggaagtgcgatgacgattctcatgggagtggtgattatcctctgctccgtgggccaatactacctgaccaaagagaaagataatttaaaataggagggcggcaagatgaaaaagaaatattttaaccggattttgctggtcatgtgcgcatgtgtgattgcgtatgcgtttctgctgccgctgctttttatgctgtttaccagctttaagggtctggcggaggcgatgacctcttcaacgctgctgcctcacacgtggacgctgcagaattaccgcgatctgtttgccagtacatccacggcgccgatctttaaatggctgatgaatacggcggtggtaaccgtcagcggtacgattttaagaatcaccaccagcgtactcgcggcttatgcgctggcgcgtcttccggttcccgggaagcggttcatcgtagtggggctggtatgggcgatggcgattccggagatcgtgacatttttcccattgttttatatcttcaaacagatcaatatgctcaattcgctgctgccgctgatcttaccctccggctcaggcgtcatgtgcatctatctgatttataatttccttctgtccttcccgagggagctggaggaagccggactggtggaaggcgccaatgtcttccaggttctgtggcacattgttcttccgtccgtgaagccggtagtgattacgcaggcgtttatcacatttctgggactctataacagctatctctggccgtcgctggtggtcaataagcaggagaaccggactgtgacgctggggatcgcagcgctggttctgggggaaaattatacgaaccccggactgatgatggcatcgaccctcgtatcggtggtgccggtcctgattatttttatgtttgccaataagtatgtcgttaaaggatttacacagtcgggtattaaataaggtaacagtacagtctctgcgtccgtctggtcttgtgctgcggtttgcccggcctttccagttccggtttcgggcataagcatttctaaatgtgcaggatttttctaaaaaccaggggaaatgcccaaactcgctgcgctcagacaggtggacatttcccctgaacgaaaaattctgcgcattaagaactgctaatgccctgcaaagtcacaggaaagaccgggcaaaccgcagcacaagaccagacggacgcagagactgtactgttatgaaataagcttggaggataacgtatgagagaagagtatccgcgtcctgattttgtaaggagtgaatgggtaaatttaaatggagcctgggatttttatctgggcggagaaaagcgaacgattgaggtaccatacgtgtgccagtgccgaaagagcgggatcggtgaacggattcgggaggattccgttgtctatgaacggacctttcaagttcccgggacctggaaagggcggaacgtgctgctgaatttcggagcggtcgattatttttgccgggtgtgggtcaacggacagtgcgtgggaagccatattggaggtcagactcccttcagttttgatgtgacccgctgtctgaactggggcgatgagtgtatccgcgtggaggtggaagactggctgaaggatgaacagatcgccagaggaaaacagtactgggaggatgaatccagttttatctggtatacgcccagcaccggaatctggcagacggtatggctggagccggtgtccgaatcacggttttcctggattcgttttacgccggacattgatgaagggacggtaaagatcgattaccggctggaacagggaacggcgcttccgtgcgagacggagatcacgatctgccgggagaacgaaacggtatttaagggcaccgtgtggtgcagggaactctgcaacaccattacggtggatgtatttcagaagaaggcgttaaacggtgccttccattttgtcggggcttactggtcgccggagaatcccaacctctatgaggctgccatggccttgcgctgcggcgcggaggtgaccgaccgggtggagagctattttggaatgcggaaggtccggattgaagacggaaaaatctatttaaacaaccagccttactaccagaagcttcttttagaccaggggtactgggcggaaagcctgattacagcgccttccgatgaggactataaaaatgatattttaatgtccaaggctatgggctttaacggatgcagaaagcatgaaaaggtggaggatcccaggtttttatactgggcggaccatttgggctttctggtgtgggaggccatggcgagtttctgggtctatacgccggagggcgcctgtgcctttatgaaagaatggatggatgtgatccggagagactacaatcaccccagcatcattgtctggggcatgttaaatgagagctggggcgttccgggaatctatgagaatcaggagcagcagagtttttccaaatctctttactatatggcccacagtctggattctacccgcctggtgatatccaacgacggctgggagatgacggatacggatatctgtgcggtccactcctaccaacacggaagagaggatgacgagaagcagcaggagctgtataaaaaatgtttaaaagacatcagagatcttccagggattgtggaaaaacggttgtttgcaaaggggcattcctatcagaagcagccggtggtgctgaccgagtttggcggtattgcagtctcggaggacgagagcggctggggatatacggcaatcgggcgatcggaattcttaaaagagtacagccggatcattgatgcggtctatgattccgatctgctctgcggttactgctatacacagctgactgatgtagagcaggagaccaacggccttctgacagatacccatcaatataaatttgacccggaaaagataaaggaaatcaatgacaggaggggctgacaatgaaagtgactgcgcaccggggatacagcggaaggtatcccgagaatacgatgctggcgtttaaaaaagcggtggaagccggatgcgatgagattgagctggatgtccagcttacaaaggatgatgtggtggtggtgcttcacgatgaacggatcgaccggaccacggatggcaccggctatgttcgtgattatacgtatgaagaattaaaacagtttaacgcagccaaatgctggaatggaaggtacgaaaccatggcgattcccacgtttgaggagtactgcctctgggtgaaggatgagccggtgaccaccaacatcgagtttaagaccagtatttactattacgaggggctggaagaaaagacgatagcccttctgagaaagtaccacctggaaaagaaggtgatgttttcctcttttaaccacgtgtctctgctgaaagccaaagagctggaaccggataatgaatgcggaatcctggtggacgacggactgggcaatgcaggatatttctgcagccggtacggcttcgagtgctaccatcccaatggggcaaaactgacggatgacgtggtggaaagctgtaccagacatggaatcaaaatcaacgcgtggacgatcaatgatatggctctgctggaaaagctggctgacttaaactgcagcggggtaattacgaattttccgggaatatgccgcgcctggcgtggatagcgggaaatgcggaatttactttacatgcgggaaggcggaaaagctgttgaaggaacagagaacggaactgcttgaaaaagcggaattatttgtcctcgatatggatgggacattttacctgggagaccggattctggatggagcgctggacttcttaaagacggtagaggaaagcgggcgtaaatacttattttttacaaacaattcttcccggtcgcccaaagtctatctggaaaaactgaagagaatgaattgtgagatcggccgggagcagatcatgacctccggggatgtgatgatccggtacttaaagacctgttatgcggggcggtccgtatatctggttggaacaccggcgctggaggagagcttccgcgaggctaaaatccgtctgacacaggagatgccggacgtggtggtgattggattcgatctgacgcttacctatgaaaaactggagcgggcatgtacctatatcagaagcggagctgaatttcttgcgacccatctggatatcaactgtcccacagaagacgggtttatcccggactgcggcgcgttttgtgcagcgatttccctgtctacagggaagcagccgagatacgttggaaagccgtttcctgaaaccgtggatatgattctgaagaagaccggcgtggacagggagcgaatcgcatttgtaggcgaccgtctgtacacggatgtggctgccggtgtgaacaatggcgccatgggaatgctggtgctgaccggggaaacgaaaagagaagatctggagggagcggaggtagtccctgatggcgtatatctatccctgaaagagatgggggaactgctgagaggagcgggagattcgtgaaaggacggaaatgacgggggttgacatttaaactttcttctgctattattaacataccgacggtatgtatgtaaaaggaggagagcgtatggcacgtaataagtatccggaggagacggttcagaagatactcgatgtgtcccgcacgttgtttcgggagaaagggtatgaccatacgaccattcaggatattgtgaatgcgctgggaatgtcaaagggagcggtttatcaccactttaagtccaaggaagaaatcatggaccggctgaccgatgtctactacgatgaggctgaatggtttatggatatacggctggatccatcgctaaacggtctggaaaagcttaaggagattctccgcttcttgtttaccgataagaagaaatttgagctggataaactgatgccgtattccaacaaagataatccgcggcttcgtaccctgattctggattccaccatacgagattctgcgccatttattgcagagctgatcgaggagggaatccgtgatggctccatacatgtgacgaggccgaaggaactttctgagaccatgatgatcctgatgaatgtctggatcggaatgtttgcggaaaacagagaggactttcttataaaaatcgattattttcaggaattctgcgaaaagatgggacttccggtgatcgatgaacgcattaaggaagccataatcgggtattatgacgaagtaatgaaagaacagccagggcgggcttaattccgcccttctttttcacaaagatacataccaaccgtcggtattaaaaatgaggagaataaaaatatgaattcacgcctgtttcaacgagatttttccattatgattctgggacagataatttctttgttcggtaattcgattctgcgtttttcactgtcattatacgttctggatgttacgggatcggctgccgtgtttggtaccatcctggctgtatccatgatacccactttggttctgtcgcccttcggcggagttttggcagaccggcttccgaaacagaagattatggcgattctggatttcgtgactgcgggaatgattgtgagctacgatgtgatcttcggaagtatcggcagtttggctgcagttgcggtttttatgattcttttgactctgatccaggctttttatcagccggcggttcaggccagcattccgcttctggcagcccgggagcatctgatggcggctaacgggattgtgatgcaggttcaggcccttgcaggactgctgggaccgattttagccggtatgctctacgggatcgggggagtgaagccgatactggcggccagtgcggtctgcttctttctatcggctgtgatggagctgtttctgcggattccgcatgataagagggcaccggaggcttctcctgtacgcacggctcttctggacttaaaggaggcgctgttctacttaatcaaagaaaatacctgtctttttaagctgcttatcattgtggcgggaatcaatctcttcctgtctgcacttttcatcatcggtctgccgtatctggtgaaaatatatcttggaatgtctgcacaggcctatggattcgctgaagcggctctcgggctgggatcaattctcggaggtctcttatccgggctggctgggaagaagattaagtttaagcagtcccacttttttttaatgggaacaccgctgcttttaataccggtgattttaattctgctgaccggggcgccggatacgacagtctacgcggttcttctcttctctgttatgacgggaatggcgtgtgcggcaatgtttaccatagcggcacagacctttatacagaagagtaccccggttcatttactgggaaaggcaggcgcgtttgtatccacgatctgtgtctgtgcgcttcccgttggacaggcactgtacggagggctctttgaactgttttccgacagaccatgggtggtcgtgctggcaggatcggtgatcagcatggcgctggcagatgcggcgaggatgaccttgaggaacgcggaggaataactgacggagccgacccggccgaaccggactgcggcgcgcctggcggggaatgaactgtccccatttatgtgaaatctctgtgaaactgtagaatttatctgaccgttttgttacaataataagcagagataagttgtatgatttcagttcaggaggttatcatggaacagttaaagatattagtagttgatgacgaggccagaatgagaaaactggtaaaggattttttgagtgtaaagggattttcagtgcttgaagcttccaacggcgaggaggcggtggatttgtttttcgagcagaaggatattgcactgattattctggatgtgatgatgccgaagatggatggctgggagacctgcaggactatcagaaagtattcccaggttccgatcatcatgctgacggccagaagtgaggagcgtgacgagctgcagggctttaatctgggcgtggatgaatatatttccaaaccgtttagcccgaagattctggtggcgcgagtggaagcgatcttaagaagaagcaacgccgtctcctctgatttgatcgagatcggaggaatccgtatcgataaagcagcccatcaggttacgatcgatggacagaatattgacttgagttataaagaattcgaacttctgacatattttgtggagaatcagggaattgccctttcgagagagaagattcttaataatgtgtggaattacgattacttcggcgacgcgaggacgatcgacacccatgtaaagaagctccggagcaagatgggagagaaaggggattacatcaggaccatctggggaatgggctataaattcgaggtgagtgaatgagatattccataaaagcccggtttgccatggtgttcgtgggactgatggcatttgtgctgattgccacctggtgtgtgaataactggttcctggaaagcttttataccatggacaaggttgccacactggaaaaggcatatacgggaatcgaccggatcgttacggaaaccgaacagaagggcaccgatatttttgaatactttaaaagcacctatgatcccaaccgagagaacgaggggccgatccagcagttattccgggtccttggcgagaagtacaatatgaatattgtgctgatggacagcgccaccgatcaggtcctgatctctaatacgggggagcgggattacttatccagccgggttcaggggtatatctttggaaagaatatgccgaaggtcagcattttaaagacccacgataactattttatccagaagacgtatgacaagcgctccgattcctattatctggagagctggggatatttttcagataacaagacgatctttctgatgtcgacaccgctggccagcattcgggagagtgtggagctggctaaccgcttcctggcgtatgtggggatcgcggctctgcttgtcggaagcttatttatatattttgccacgaaaaagattacttccccgattcttcagctcgccaatctgtcagagaagatgtcaaatctcgattttgacgcaaaatacaccggtcaggcggaggatgagatcggcgtgctgggcaacagcatgaatcggctgtccgatacgctgaaggagaccatcggccagctgagaacggccaacacggagctgcagcaggacatcgaggagaagatcaaggtcgatgagatgcgaaaggatttcattgcgaatgtatcccatgaactgaagacgcccattgccctgattcaggggtacgcggaaggtctgacagaagggatggcggaagacccggagagcagggattattactgtgaagtcatcatggatgaggccaataagatgaataagatggtgcgtcagctcctgaccctgtcagctctggaagccggcaacgacgccccggtcatggaccggtttgacttaaccgatttaatccgcggagtaatcaattcggtcggtattctgatacagcagaaggaagcagatgtacatttagaggactgcggccctgtgtatgtgtgtgcggatgagttcaagatcgaagaggtggtgacgaactatctaaacaatgcactgaaccatctggcaggcgagaaaaagatagtgatcacggtggaggataacggagaggaagcgctcgtaactgtgtttaatacggggaataacatccctgaagaagatattccgaatctgtggacgaagttctttaaagtggataaatcccatacgagagagtatggcggcagcggtatcgggctgtctatcgtaaaggctatcatggactcccacagaaaggcctgcggagtgagaaatgtggaaggcggagtggagttctggtttacgctggattgttataagagataggatataagacggagacaggcgatgcgggttagcgtatcgtctgtctccttttactttctaggaaacttcgcaaatcggccaagatagtgtataatggacttgaaataaaaaatcacataacaaaagagcgaatgtagtgattcgccacgacgttaattatgtagttttttgtttttggtttagactgcgctgtctgacggcaaagaaagaataaggggcatggaactatccataacccattacctttcggaatcgttcaaatagcgcagtttttttgtagtaaacttctaaaaccaacatagaagtgccacacttcggacatttgagtgggtcatatccaaatgtcagaataatcgagttacgccaatccagaagactggaaagatagcgttgtttctgaggggataaacattgccgaagatttttttcctgtttatgatgttttgcataaataccatagtaacgaaccattttgaagtgcttgtcagggatatgaataatcaggcgttttataaagtcaataacggggaggcattctgtaaccgtcttgtgatcctcatgcctggtgtaatgaaacgtcacagagtcaccatcgtaagaatcaattctggaggcagcaataaccggtcgtccgagatatcggctgatatacttaatggtgatatttggagaacagagattgggtttagcacggatataaaaaccattcgggtgatccttgtaaatctggtttttaagtttaaggaaagaagaaccgagtttatgcgcaagtttttctaaaagaaccttacggaaagcgaagcgtaaaaatctgaaatcaaaatgtttgtttggacgccaagaggtaatattaccggtaccgccctcggagatgagcgcatggatatgagggttccatttgaggtctctaccgaaagagtgaaggacacaaataaacccaggagtaaaattttcagttttattaagtttagaaaacatacggaggacgatatcgcggacggcatgaaaaagacaattcaaaagagaatgatccttaagaaagaagatgcgaagttcctctggaatcgtaaacacacagtgcctgtggttacaggaaatgagcttgcaggacatacgaaaagcccgtttctgattatacatgttaccacaagaaggacagaaacggcttttgcaggaaaaaggtacagatttaagtttaccacaatggggacagccgtagacagcttgtccataagaaggatcctggcaatgaatcatacgtttgatgttatccataacatttttgccaggacgaagaacataatggatgtactcaaagtggtcactgaaaatagtttgaagaatgttctttttatacataagaatattttacaacaaaaagtgacaaaggaaaaccccaaaacccctcatgagtgaggggcaggggagttgagagtgccgaaggcactttgttctaactataaaaaggagtaaaaatcgggaactgaaaactccgcggacagctgctggctggcaatgctgttgaggacatttggtttgctgccctcgcgggaataagcgaagggggaaatgtatgatgaatacattgggggcttttttttaagtccctttttaatgtaaaataaactcttcaacacattttcaacagccgctgctgcatttccactctctccctcacctgtttcagaaagttatcaggtcccagcacctttattaccggtccgaaggagagaatctgtattaacagttctgtttccacgtcccggctgtaataaatccggcagagatatttaccggaatcgcccagcttttccgttcgtttctgatagcatgcgaaatgaagcatggtccgttctaatgcgttgcgttcattggatatttccagaagcacaggctcctggcagagggagtgttctaaatatgcgtcgatgtccgggcggatttccagggataaaccagtgtcttgaatccgcatgatccttgacagattgagaatcgtcagccagcttaagctgttatcattccggacgcggacagccataagacggaatttgtcgtctttggcagagtattccagccggcagggaagatagcgggaggcagtcagatgattttttgctgaaaagtaatcgataaccagtatccggttctcgcggattccttccagtattgttttaaaatgctgccggtacgaatccagcgtataggcgtctccgtccgaatactggtcaaaatacgaaaagtcctccggataaaacaggggctgaatatcctttaagtcctgatccagttccctgcactcttcgtcggtaaaaaacaggcgaaatctgggatctgcggatattgctttcagccaggaacgctgaagcttagtcagaggcagaggcgccggcgcttttacacgggagcgaaaaagcggcctgccgggattgccttccccggatctttccagtaaattccattctccgcttaccagctttgggacgatagagagagcgctctcctcatatccgtatgtatccgcaatgcggtttaagtcgcattcagacaaaccatgttctgcggcctcgtccagaatccggcgcacgaccagaaaataacagttgtagatttcagaaaacagttcaggctccatcgttgttcacctcccgatctgccgaatgtatatgagggggacttttcgcacattccgccgaatgtacatgagggggactttccgcatacattttcgccatgcgttccatatcccggaagaatttcttctctatcatggaattcgagcaggaaaaggaaaggatccgtccggtaaatgttttgacccacggcatcagctcgttgcagtcaaaacattcgcgggtatagcgccagacaccgtgatccagccgcgttatggtaccgccgcggccctcccgttccaggcggctgatgatgtgggcctcccgttcttcattaagcgacagggtgaaggaaagcatttccagccgctcttttctgcggccgtcgccaaaggagactccccatgtctttggcagattcttttccagatcatttttgtgctgttcatacggtgcctccaggctcttttcttctgacgccaacagactcaccgacaggagatagtccagcctgaaactggagaagcgttttgttcttgtctgataaacgacgacgtagcgccggcctgtctgcgtgctcaccagaattttcaggggaatcccttctgtaagttccgtccggcctgtcttggcactcttattttccagtctgatttccttatgttccctcatggcgcgcaggagctccagaagaatttcatcttccaacgtatgaaccagaaaatcgtgcttgagccggaacacggtattttccttttgaagattatccagtatggtgctgccgataaagccaaagggggcgcatccctgataaaaactgaccatgtcaatgaaaccgggagaccgtgtcagctcttccgccgggcccgtccaatgcagatttgaggaggcattctctttatcaccacagcaattctccagcctcccataaagcagccttcgcccttcctttcttacacttaaaattcccaaagactcatattccaccagtttttttcgtaccgtctgggaatcgaagaggattccgtaccggttctgaagctcgtccgctgtttcgtccgctgtgtaaaaactgccattcccgaataaatccagtataaagaaatgaagcatgatgtcattggaggtaaaactttttgatttccagacggaaaacagcgggttgacggcgatccggttgctgtggacgatgatggccactgtttttttccgttcctcgttgtactcgctgtgaatgtagggggaaaaccagctttcaatccgccggcgctcattgtcataggtgcgtccgctgccctcgctgtagtcttcacgggttttaaaaccatatacatagaaatccctcacataggtacggatccggtcgaaccgtttcacaagttctgaaaattctttcatggtatcgtcactttctttgggtattctttggctgccttgcgtaaatcatggtggatcaggtgtttgatatttgcccagagcaccagagcgtgtttgaacattcattcctcagagcagctgtcagaaagcaattttcagccacactccggtatgagccaatccttaaaaatgattatacttccattttttccttatgtcaccaggttcgcacccttttttaaatgattccttcaggaaatactggtaagataaagtcacaacagagaacaattcataaaacaggcgggagtcctgggaaaaggggaatgagattatgtttacatggaaagaagagcagatgaataagccggtaaaaatctggctgaaaaatatagaagaagcagaggaaggctgtctggaacaggcgcgccacctggcacagcttccgtttatccataagtgggcgtgtctgatgcccgatacccaccagggaaagggaatgccgatcggaggagtcattgccgcagacggcgtcatcattccaaacgcagtaggcgtcgatattggctgtgggatgaattttgtttccaccaatataaaggcagaggatatgaaacctgttataaccggtaatggaaccatgttccaggccattaccggagagatcatgagaaatatcccggttggttataattcatataagaagagacaggaatcggaggttctggaccggtgtctggaacacgcctccgattatgagaagaatgaagcgttgtttccgctgatggaggatgccttttaccagatcggtacgctgggcggcggcaaccattttatcgaactccaggaggatcaggatggatatctggggattatgattcactccggaagccgccattttggaaaggaaatctgtgattactttcacaagagagcaagggagttgaatgccgcgtggcacagcgctgtcccggattcgtaccatctggcatttcttcctgtggacagtgcagaggggcaggactatattctgtggatgaacctggctttggaatacgcatttgaaaacagaaagcgtatgatggagaaaactctggaaattgtagctgagaaggtggaaaagtatctggatacaaccatggaatttacggaacatatcaactgtcatcataattacgcctccttagagacacattacggaaaagaggtatgggttcaccggaagggggcgacgagagccggaaacggtgagatggccgtaatcccgggagcgatggggtcctacagctatgtagtcatgggaaaaggaaatccggagagcttcgaaagctcgtctcacggagcgggaagggcctattcccgaaaggctgcaatggagaaattttcctgcgaagaagtcataaatgacttaaaggcccagggtgtggttcttggaaaaatgaagaaatctgatgtggccgaggaaagccggttcgcttacaaggatatagaccatgtgatggatcagcagaaagatctggtcgtcccggtcaaaaagttaaagacggtcggtgtggtgaaaggttaggactgggaaccacaccggatcaaatggatcgttgctgcagaaatcatggcgtaagagccagatggtgccggctgcgctgcagtacggtatgccgcagtttatgatagcgccgaaacggcaggcagctgccatcggaggatgatagttcgcgggttcgaatcccgtctgcctgtttcaggcagtagctaagtggtatagcaatcattagacacctgtcaagtgtccctaaaaagatggagagaaagccggattgccgggctgaaggaaatatggctgcgaaagcagacgcaggactgacttgtcggagtgtggtttcacacaaagtaaggcatgttcctcgtgggagcctgagaagcaggaattcccataagtccgaagccggcatgaaaagagccttgcgatgaggcggcttccgctgatttaaagtttagccctgatcggccggttatgcgggggcgagttgtacgctgccagccgcctccggttctgtcacggcaaatgaagaatctgccaaagcccatcccgcttttttcatgcggtgatccggtgtttcaacccacgtaaaagaaattccgtctatggtaagggacgcaggaggaagaagaaaagaggaaaagcatatgcgtattcatatcaatcagacccagtgcgggtttgtcataaaaaatggctgttatcagaaaatgatatttgccggaacatactattatccggcctgtatgggatataaagttgtaatagaagagatgcggggaagagtgagctttaaggaggttccactgaaggtattaaaggaggacaaagtgttcttaagtcgtgtaacgatagcggaagtaccggaggggcagctgggagtcctgtatataaaccatgcagcgagtgcggttgtaacagaccgggaggctgcatactggaatgtctgggaaccgtgtgagcttcgcatgatcgatatgagagagccggcgatggatcggactgtcgaaaagagccttttgcgtctgattgaccagcagtattataagaagattgagatcctgccgggggagaaggggctgttgtatcaggataatattctgacggatgagctggggcccggaacgtattattactggctgtatgccagggatgttttatgccgcgtcgtggatttaaagatgaaggaactggagattagcggccaggaaattctgacggcagaccgggttggaatccggctgaatttgactgctacataccgaatcgcagacccgaggcggctggtggagaccattaagggggtagaaaaccagctttatacccgcattcagctgattgtgcgggaatacataggccgctaccgcctggatgagattctggaacagaaggaagccatcgccggatttctggcacagcgtatgagggaagagcaggagcagtactgtgtggaggtccagaccatcggtatcaaggatattatccttcccggagagattcgggatatcatgaatacggtactgatcgcggaaaagagggctcaggccaatgtgattacccggcgtgaagaggttgcatccacccggtcgctgctaaataccgcgaagctgatggaggagaacaagacactttacaaattaaaggaattggaatgcctggagagaatctgtactcaggtgggaaatatatcggtagcaggaagcggaaccctgatccagcagcttaaggaactgctgggaacgtaaccctgatagcacaattgcatggaattaactgcgaaggcggcggagagacaaccaggaatcggttgtccctccgccgttgtttcagaataccattgtaacaagtgcacaagatgatttgactaaaattaacaaaaatacaaaggtcctgcgaaaagacttgtttttgcgattaaattttaatatcataatgttatgactttatgaaaaacacctgtgtaaagcagaacgaaggtcagatgataccggaacaaaataaaagcagacggattggctggatccgccgccgtactgatgccgtttgttgtcttgaaccattaaaatagtatataaggagggggcagaatatgttaaaccatgaaaaaggagctccgccgctttattcccagctggaatccattattaagatgcagattgagcggggagaatataatcggggggactttcttcctacagaaaagatgctgatggatcagtatgagatctcgagagttacggtcagacaggcgatggcggccctgtcccaggccgggtatatcaaatgctccagaggaatcggtactgaggtcatttacgagaagattgatgagcacatgaagagcgtcatcagctttacagatgagatgaagcagcataacatcaccatggaaacgacctattgccggatggagaagattatgccggggacaaccgtggcgtcggcgcttcagattcccttaacggatcagtgttactgtctgacaagggtccgcagtgtacaggggaggccattggtatataccattacctatatgagagatctcgtggaacttcccatggacagtcagtattacatggaatcactgtataaatatttaggtgaagtccatgagatacgaattgtgaggggaagagatacgctggaggcggcgctgccttctctggaagttcagaagtttttggaaatagatgctcaaatgccggtatttaagcgaacccgccagacgtttctgccgggagaagactttcccgcactgcataccagcggaaaagacggacttgtattcgagtactctgtctgttattatccgggaaaccgttataaatacacggttgatctgtagaaggggactgcggttctgatgaaaggaagggggccgggcggagcagcagatttcctgcggctccgggatctctgcagtgataaaaatgatactattgtgtacagcagagaaaaaaacaccatatattgtgtataaaaatatgcaattatggctattataaaaaaaaatagaaaaatacaaaatatatgttgacttttgtcaaatgctttggtatgatatacctcgccgctgaaaacggcggcaaacttttccgaaaaacgtccggcctgaccgctgagagagttttgaagaaaatgaaaaaagtggttgacaaaaatgaatcactgtgataagatataaaagttgctgctgacacagatcgacagcaaacgcactttgaaaacagaagattgaacagtatgtaaaaccctgaaaattctaataaaacaagccattgtttgatggctttgaatgagaaaattcagaacgaatacaagtattgtatacgaaccaaacaacaagtaaaacgggaaataaattagctagttagttgattttgaccccggatcaaacgaatcatttaacatgagagttcgatcctggctcaggatgaacgctggcggcgtgcttaacacatgcaagtcgagcgaagcggtttcaatgaagttttcggatggaattgaaattgacttagcggcggacgggtgagtaacgcgtgggtaacctgccttacactgggggataacagttagaaatgactgctaataccgcataagcgcacagggccgcatggtctggtgtgaaaaactccggtggtgtaagatggacccgcgtctgattaggtagttggtggggtaacggcccaccaagccgacgatcagtagccgacctgagagggtgaccggccacattgggactgagacacggcccaaactcctacgggaggcagcagtggggaatattggacaatgggcgaaagcctgatccagcgacgccgcgtgagtgaagaagtatttcggtatgtaaagctctatcagcagggaagaaaatgacggtacctgactaagaagccccggctaactacgtgccagcagccgcggtaatacgtagggggcaagcgttatccggatttactgggtgtaaagggagcgtagacggtttagcaagtctgaagtgaaagcccggggctcaaccccggtactgctttggaaactgttagacttgagtgcaggagaggtaagtggaattcctagtgtagcggtgaaatgcgtagatattaggaggaacaccagtggcgaaggcggcttactggactgtaactgacgttgaggctcgaaagcgtggggagcaaacaggattagataccctggtagtccacgccgtaaacgatgaatactaggtgtcggggggcaaagcccttcggtgccgccgcaaacgcaataagtattccacctggggagtacgttcgcaagaatgaaactcaaaggaattgacggggacccgcacaagcggtggagcatgtggtttaattcgaagcaacgcgaagaaccttaccaagtcttgacatcccactgaaaacactttaaccggtgtccctcttcggagcagtggagacaggtggtgcatggttgtcgtcagctcgtgtcgtgagatgttgggttaagtcccgcaacgagcgcaacccttatccttagtagccagcgagtagagtcgggcactctggggagactgccagggataacctggaggaaggtggggatgacgtcaaatcatcatgccccttatgatttgggctacacacgtgctacaatggcgtaaacaaagggaagcaaaggagcgatctggagcaaaccccaaaaataacgtctcagttcggattgcaggctgcaactcgcctgcatgaagctggaatcgctagtaatcgcgaatcagaatgtcgcggtgaatacgttcccgggtcttgtacacaccgcccgtcacaccatgggagttggtaacgcccgaagtcagtgacccaaccgcaaggagggagctgccgaaggcgggactgataactggggtgaagtcgtaacaaggtagccgtatcggaaggtgcggctggatcacctcctttctaaggaagaagaagtaggggttttagatactgttgagtcttgtgtttcaaagaagataaaaataattgaataagaaacgccaagaaagactggaaatttctggtgccgatgcgcttaggggaaacacccgtacccatcccgaacacgatggttaagacttaagcggccgatggtactatgctggagacggcatgggagagcaggtgggtgccagattatttatgggggtgtagctcagttgggagagcacctgccttgcaagcagggggtcaagagttcgaatctctccatctccattcggtatgaaggaaggaagccgtaaggtaaccgggagtcatgccagcatgtaccttgaaaaccacatattgaatatatctagatagattcttttaagggagtttaatcccgagaaagagtaaatcaagacatccgaggtgttatatcgtaacagatataaccgaaaattataaactcgttgttgctgtaacgtacagcgataacaaacctaagaccagagattcaacgctatgaatcttagatgagtaatccgcacccgcagatgaaaatcgaactggttaagctaaaaagagcgcagggtggatgccttggcactaagagccgatgaaagacgtgataagctgcgaaaagcttcggggaggagcaaatatcctttgatccggagatatctgaatggggaaacctggctgagcaaacctcagtcggcgtatggtgaatccatagccatacgttgggaacccgctgaactgaaacatctaagtaggcggaggaaaagaaagaaaactcgatttccagagtagcggcgagcgaaatggaaggagcctaaacctgggtgcgtgcacccaggggttatggactgcagtaagtgactcgtatggtaacagaacggtcctggaaagaccggccacagagggtgaaagccccgtatgtgaaaccagaagagagcgggcatgttccaaagtaccacgagacacgagaaaccttgtgggaagtcggggggaccaccccccaaggctaaatactccttagtgaccgatagcgcatagtactgtgaaggaaaggtgaaaagaaccccgggaggggagtgaaaaagaacctgaaaccctgtgtttacaaactgtggaaccacattttaggtggaaccgcgtactttttgtagaacggtccggcgagttgccgggactggcaaggttaagcactcaaggtgtggagccgaagggaaaccaagtcttaatagggcgttgagtcagttcaggcagacccgaaaccgggtgatctacccatgtccaggttgaagtttccgtaaaaggaaatggaggaccgaacgcacatccgttgaaaagggtggcgatgaggtgtgggtaggggagaaattccaatcgaacccggagatagctggttctcctcgaaatagctttagggctagcctcgtattagtttagcggaggtagagcactgaattcttaagggggcgtcaaagcttaccaagagatatcaaactccgaatgccgcataaatgatgtacgggagtcagactgcacgagataagttgggcagtcaaaagggaaagagcccagaccaccagctaaggtcccaaagtgcgtgttaagtggaaaaggatgtgggatttcgaagacaactaggatgttggctcagaagcagccacacattcaaagagtgcgtaatagctcactagtcgagaggtcctgcgccgaaaatgtccggggctgaaacacgacaccgaagctgtggaattgacttatggtcaattggtagaggagcattcttaactgcggcgaagcgttaccgtaaggaggcgtggagtgttaagaagagagaatgccggaatgagtagcgagatggaggtgggaatcctccaggccgaatatctaaggtttccagagtaaagctgatctgctctgggtaagtcggggcctaaggcgaggtcgaaagacgtagtcgatggacaacaggttgaaattcctgtaccgcgtattatcagaactgtggggacacagaaccgaagccaaacccgggaatgaaaagaccggggcaagcgccggactggttagactggaaaatccgtttaacaacaggaaagcgtgacgcgtaccgaacaaaagtagggaagttggtataggggctgtcaagaaaagccgctattgtgtaatacgtgcccgtaccgtaaaccgacacaggtggatgaggagagaatcctaaggccggcgggagaagcattgttaaggaactcggcaaaatgaccctgtaacttcgggataaagggtgcccacgagagtgggccgcagagaataggctcaagcaactgtttagcaaaaacacaggtctatgcaaaaccgaaaggtgaggtatatgggctgacgcctgcccggtgctggaaggttaagaggagaggttaggagcaatccgaagctttgaatttaagccccagtaaacggcggccgtaactataacggtcctaaggtagcgaaattccttgtcgggtaagttccgacccgcacgaaaggcgtaatgatttgagcgctgtctcgacaatgcacccggtgaaattgaagtaccagtgaagatgctggttacctgcgccaggacggaaagaccccatggagctttactccagcttgatactgggattcggtactgcatgtacaggataggtgggaggctaagaaggtaggacgccagtcttactggagccattgttgggataccacccttgcggtattgggtttctaacctgcggccatgacctggccgggggacaatgtcaggtggggagtttgactggggcggtcgcctccgaaagggtatcggaggcgctcaaaggttccctcagaatggacggaaaccattcgaagagtgcaaaggcataagggagcttgactgcgagaccgacgggtcgagcaggtacgaaagtaggacttagtgatccggtggtataaagtgggattgccatcgctcaacggataaaagctaccctggggataacaggcttatcactcccaagagttcacatcgacggagtggtttggcacctcgatgtcggctcatcgcatcctggggctgaagtaggtcccaagggttgggctgttcgcccattaaagcggtacgcgagctgggttcagaacgtcgtgagacagttcggtccctatccggcgtgggcgtaggatatttgagaggagctgtccttagtacgagaggaccgggatggactgacctctggtgtaccggttgggtatcaaacccatggccgggtagccaagtcgggaagggataaacgctgaaggcatctaagcgtgaagcccccctcaagatgagatatcccatcgcaagagtaagaccccttgaagacgacgaggtagatagggcagaggtggaagtgcggtaacgtatggagctgactgtcactaataggtcgagggcttaaccaagttggtttaggaaaagaggaaataagaacggatgaaaagatatgtacaatgtgtggttttgagggtatatgccctaagagaaaacggagagatgagagtcgcttcgtttttatagaataagcgcgagtggctcagtggtggagtacaaccttgccaaggttggggtcgcgggttcgatccccgtctcgcgctctgagaataagagaaagaaagcggatttccagtgatggagatccgctttctttttgctttactgatacctgcagccacgtagaggaagggccaggcttaaaacagtaaaccttctgttttaagacctggccgtaaaatgatatgacctttgctgcacaaatatggaaggatctacagttcgcctttctctctgagatcttttactgcatttacaagagtttcattctggatgtgggtgccgattgagatacgggcgtatgggaaatcgccccggatcattactccatagggaaggagtgcaaaataaagatcctgacaggaacagccaaaatctgcgtagataaaattcgcctgagattcgtatactttgtatcccagcgctgtaaactctctggtcagataatcccgctcttcccggttgctgttaattgtcagaagacggaagtcttcgtcatccagggctgcgattgccccctcgattcccacggtgttgagagaacgggctgccatcgccttgttcatatatccaatgatttccgggcaggccagagcatagccgatacgaatgccggccataccatagagctttgagaaggtacgtaccacaatcatattgggaagatccttcagatgagagaccatggtggtcttctccgggttatctgtaaagtctatgtaagcctcgtctacaacaacgataacgtcctttgggaatttctgaatgaaggaatacagttcatctccggaaagacaggtacttgtaggattgttgggattacatacaaatacgaggcgggtcttatccgtaactgcatttaacacagcctcggtatccagcttcatatcatcctttctcgaagggatatctacaatcgttccattatttttatagacaatatagtagtaaggcggataagccggggaggtgataatgcattcgtctccgggtttgatgaatgcctcacccgcaaaggccagtgcattggcagcgccgcaggtgatcatgatgttctcaggaagcaagctgtgcttctgtgccagtttgttttttaaaacagtatcgagggtagaatccgggtacagatgacagtctgccaaagacgctgccatcgcttccagagccttaggtgatacgccataggggttttcgttagatgccagcttgtagagtgtatcaaggttgtatttttcttttgcagccttaatggaaatgcctaccggaatgacggtagatggtgcttttttcagggcatagccctgagccagatgttcaaacatggataatccgctcctttgcatattgtaataattacccagattgtaacatgatgatgatagtttgtcaatcgattttcaatataaagtttgcaatatataacaataaacttgtctaataaaaataaaaacttatcaaaaacttatcaaaacggattgacaaaacgtatgcgggcaagtatagtaagaatgaagataaaatcattttccgctttgcttccaaatgcaaaacggagaaaaatttaatggctaagccgaaaggagacggattttcatgagtatcagagagaaaagagtatcttttaaggaactgttggagaaggaaaaaggggttatagccccctgtgtatttgattctgcttcagcaagagctgcatacctggccggtttcaaagccctgtgcttaagcggcgcggaactttccatggctatggacggtctgcctgatcttggcattcttagtttgccggagctggagtggattgtcagccgtatcacagagaactgcccacttccgattatcgtggacgcggaagacgggttcggaggaccacagaacgtataccgtacctgcaagcgcctggctgcagccggagctgcggcaattctcatggaagatgaatcggaaccgggattcgccaaaggcgttgtagagaaaaatattattccgaaagaagagtactgggcaaaagttcgggcggcaaaagcggctctggaaggcacagactgtatttttattgcgcgtacaaatgtgctgattaatacagaagaaggttttcaggatgcgattgagcgctgcagaggatcgctggaagccggtgcggacatgctgctgatcaatcagttaaagaccatggaacaggctgaacgggtttccaaagaattcccggatgtctggaggatgttccccgatatcaaccagtccgtaaaacagccgaccatggatgcgaaggatttgtatccattgggttataatattgtcaccatgcatttcctgatgaaaggagccatggtgggaatgctggactatgcgcttcgtgtggcggaggatcagaacaatatttatccgcgtgatgatatgccttacaatatctccggacagagtgcacagccattttatccggtacaggaatggctggatctggaagccggattttccggtatccataataccttctggggcgataagctggatctgagcaaacgaaaaaaataggacagtatcataagagagcgatgccgaaacaaaaacggcatcgctctctgtctgcctgattaaaaagcggcatcgtgccgtgggtgcagggaaaaggctcattgggattgcgaagatacatcaatttgtgatatgatggtcgatgggccggaagaccctgtgataactggaaaaattgaagaatggaagataaaaggagcatattcagatgaatgacaagctgcttgtggagacggctgtattggccggagaagtaatgctggtgagcggagcggaaatctaccgggtggaggacaccatcaagcgcattctgcaaaatgcggacaggcgtacctcagaagcgatcgtactgtcaacggggatcttcgtgacgctgaacgatccggaactggaaccgatcacggtgatcaggcgggtgaccgaccggtctacaaatcttaataaggtttacctggtcaataatgtctccagacagttctgcagcggtaatatgactgtggaagccgcttatgaagagcttcagaaagcgtgtaaggcacagcagtacaggccctggatgaagaatgcaggagtcatctgtgtatccctgttctttgccctgcttctgggcggaggagctgtagattgtacggccgccgcatttgcgggcgcattgtctgcgggagtcatctggatgtcgggccggatcaggcttaatgtgttctgccagacgtctctgggtgcattttccatagccgtggcagctcttatgatgaaacaatgggtgtttcctgacttgaagcgtgatattgtcatcattggatgcatcatgcccctggtgccgggcgtgatttttacaaccgctatccgggatactttgaatggggattacgcagcgggggcagccagaatcatggaagcggcagtcgtcgccctggccgtagcggccggtgtcggtatgggaatggccttgttcagccaggtgcttggaggtgccgtgatatggtagttcagacgatgggggcgtttttcgccgttttaagcttcgcactgattctggaggtgccgcggaaatatgtgtttcatgccggtttcgtaggagctgcctgctgggtgatctatttgatttccttaaactatacgagttctgtgattgttgcggcctttgtatccactctggtggtggcctttatcagccatatctttgcaaggcggtttaaggtgccggtcacggtgtttctggttgcaggcatactgccgtctgtgccgggagcctcgatttaccgcagcgtttattatatgatacgcagtgtcagtgatttatcctcgtattatctgacagagacacttcagatcgcgggagctattgcaatggctgtctttattatggattcactgtttcggctggggcagaaaaattaagggaaagggctcggcagccggccggagggacagctgccgaggaattaaaagggagaggaacagaagactgatttttctgtttctctctctttttgtttcctgcgctggtctaataataattttcctccggctggatctcaccgctttcgggacattcaaagagtcttacattatgacgctccaggtagtctctccagtcatcggttacaagctcgtcggtaaacaggttgtcaacatcttcaaagtcacagaaatgtgcaaaggatactttgccgaatttgctgtgatcagcaagcaggcaggtctgctcggcgcactggatgatggttttcttcatgtcggcgactctttcgtcagagactcccaggcctcttgccatgtcaaaagatttacaggaaaaaaaagcgcgatccacctgaaaacggcgcaggtactcggacgccgtaggtcctaaaaaggattcctcgttagcatcataccggccgcccacacaaattagattaatggttttgctctttgataagtagttgattacggcaagcgaattagttaaaactgtgatatccatattcaaaaggccctcgcacatatgaaagaccgtgttggaattatcaagaaaaatggtatcacctgctttcataaagcgtacggcacgtctggcaatgcgggttttcccttcggaaaaggtgctgttgagaagctcttttggaggaagtgcggaagtacgtttttttaaggtggcgcctccataaactttgtttagaaacccctcatctgccaatgcatcaaaatcacggcgagccgtctccacgctgatctgaaatttttccattacctctgaaatggtaatgctttctttttctagtaacatcgcacgaatcgcttcacgacgctgaactgataacattttcatgaaaagtctctccgtttccatcatttttctttcattctatcagaaaataggatttttagcaaggaaaaggggaaaagtaaaaaaatatttccagattatggaaaaaaaccgggcttatataatgaaaaatgacaactaaaatacgatattatgactgcgtttagaggaatatacacaaaaaatattaaaaaataattgacaaagttgtcatgatattgtatatctgtagtagacgctgatgccggcggtatcagtactgctttaaaaaacgtttgtcggaacagtctaactggaagaaagagaggaaagaaatatgaagagaacagcagcaactgtaatggcacttatggcgattctatcattgacagcctgcggcggcaaggccggcagtccggcgggagggagtgaggcgattacgaaacttacatatgcctgccccggaaaatcagcccgttataactttgtgaatgaggatggggaactggatggatatgagattgcaattatgaaggaagtggataaacgtctggaagacgttgcgatcgaactggtctataccggggagttctcagctctgttcccgggactggaatccggccagtatgatatcattggaggcgggatttcgtggaagcaggagcgggcggacaactatttatactcggaagtcccctatttccacagccccaccgtgctgggcgtccgtcaggacgagacagagataaagacgatcggagatctggccggtaagaacatcgctcatattgcagggactgcacaggccatgtggctggaagcatataacgaggagcatccggagcaaaagatcaatatagattatgtagatgccagcgccattgagattatgaacatggtttctaccggacgctacgatgcctgcattcatgcggcggccgatttcgcgattgccagtcaggagctgggcgttgatttaaagctgtatgatattgaaaatgccgacgaaattcagaagcctgactcttactatctctatgcaaaagataatacggagcttcagaagaaaattgatgcggtccttgcggagatccgcgatgatggtacaatggcagagttatgtgtacagtattttggaacagacttagtaccggaacactagatggagaagactttatatgaataaaatatttgatatgaaagctatttgggagtatatgcccaagatactggagggtcttcctgttacgctggaactcactgtggtggccatgattctgggcgtggtcctgggatttggcatggcaattgccagaattcgaaagatccctgtactgagccagttctgctcggtctatctgtcctttgtcagaggggttccgctgatggttttgctgtatctttcctactatgggattccgcttttgctaagggcggttaatgtaaaacacggaacggatctcaatgttaatatggttcctgcctttgcgtttgccctggttgcatttgtgattcaggagactgcctatgaatcggaaattatcagggcggcgcttctttccatcgataaaaaagagattgaggcggcaaaatccctgggcatgacggcatttcagaccatgctgcgggtagagatcccacaggctcttgttgtggcgataccgacgtttggtaatcagattacgtcactgatcaaggggacgtcgctggcttttatgattgcagtggtagacatcatggggaaagcaaaaatcatcggcggccgaacgctccgttattttgaggcgtatatctgcactgccattatctactgggggtgctgtattctgatcggttttgcatttaagtggctggagaaaaaggtaaactacagggaaagaaaggaaaagaaggatgattgaggttaaaaactggaaaaaaagttttggcgacaatcaggtgattaagggtgtggactaccgggtagaaaccggggatgttgtcgccattatcggagccagcgggtctggaaaatccactttcctgagaaccttaaactttttggaacgagcggaggagggcgtgctgaagctggaagatatcacgctggacatgtcggataaaatcagcaggaaagagattcttgacgtccggcggaacacggccatggtgtttcagggctttaatctgttcagccaccgcacggcactggaaaatgtgatggaagccctggtagtggtaaaaaaaatgaaaaaggaggaggctaaaaagattgccgccgaagaaatcgcccgggtggggctgaaggaccggatgaattattatccgcatcagctgtcgggaggccagcagcagcgggtgggaatcgcccgggctctggctttgaatcccagggtgatcctgttcgacgagccgacctctgcgctggatccggaaatggtgggggaggttctggatgtgatccgttccatttcccatcagggaacgactctgatgattgtgacacatgagatggcgtttgccagggaggtcgcggaccgggtagtcttcttttcggaaggcgtaatcctggaagaagggccggcaaaagaattttttgcaaatcccaggcatgagcggacgaaacagtttatccagagaattaataagcattaggaaaagagatccttcagacccggcgggctgaaggatctcttgaatttaagaaaggcatgtgaaatgaaattgttaatagacaccctgcgtcatcatcgcgtcggctactttttcaaagcctgcgatattggcgcctgcaaccagattgtagcccaggccatagcgctctgccgcgtctacggagttcttgtagatgttcttcattgcagccttcagccggctgtcaacttcctcggcactccaggatagtctctggctgttctggctcatttccagacctgatacgcagacgccgccggcattgactgctttcgacggagctacaatgattgtttttctggaagtgagataatctaaggcctcggaggtagtaggcatattggctacctcgatataatacttcgttccattggccgcaatgtttttagcatcttccagatcaacttcattctgcgtcgcacagggcattgccacgtccgcttttacttcccagggccgtctgcccgggaagaattgtgcgccgaacttgtctgcatagtctttggcacgatcgtttcgggaggcacgcatctctaataagtaatcaattttttcctgagtgataattccatctttgtcatatacatagccatccggtccggaaatcgtaagaggaattccccccagctccgcaatcttcttgatagcgccccaggcgacattgccaaaaccggagatggcaaaggttttccccttgatggattcgtgttcatgattcagaacttcattggtatagtatacggcaccgtagccggtggcttccgggcgaatcagggaaccgccgtaggcacgtggttttcctgtgatcactccgttttcgaatgcaatccggatccgtttgtactgaccgaacagataaccgatttctcttgcaccaacgccgatatctccggcgggaacatcggtgtccggtccgatgtaatggtaaagcccggtcataaaggactggcagaatctcatgacttcgctgtcactctttccgaccggattaaaatcagaaccgcctttcgctccccccataggaagtccggtaagagagttcttgaaggtctgctcgaatcccaggaaaaacataacgctggggtttacggttggatggaaacggaggcctcccttgtatggtccaatggttgaattgaattgtacccggtatccgcggttgatctgggtaaatccgttatcatccacccaggcgacccggaaggaaataaaacggtcgggttcgatcatacgggtcaggatgtcggccttaacgtattccggatgagcctcgataaccttttccagggaatcgtagacttccttcacacactgtaaaaattcctgtttatccccgtccctgcgctttgccgtttcaatcactgcgtcaatatactcttttgcacttgtgtaggttcgcatgtttttgttctccctcatatgaaatgaatatgcctttcttatgcctttattatagcaaagagaatccatatgtcaactacttattgccataatatgttaaaaatactattataatattgcaataaaacagtcaagatgtgaagagacgaaaaacatggaaataaaaagacgggcaagccgataaaaaggcacccgaaggcgccttttatctctatttccagtcttttgtataatcatgtaaaacctcagctccatcaaaggtatatccgttacggaaccagtaggctccgagaatgtcccccttcggtgccagaggcatgtgctcttccagttcggatggaaggaattcaagctggccgcttcctgcccatgcgaccggatcggactgcttattgaccgctcccagcttaaccagttcgcatacggaaggccggtgcccgggaacgaggcttgggaagtgacgcagatgaatcaggggcagccccatgggcttgggcagctgatccggggttatctgacgctcaatcgtgagcgtgccttttatcagcctttcaccatgagaggcgacggttccagttaagcttgctcccggccccatcttcggcatgcccggattgtagggattatagtctgttatgctgatctgtcccagcttcttgggaaagcccatggcccagcctctcgccatggaaaaatcgttgtctacccagatggggaggcagatctgagcctcttcaccattataattacagccggtccagatggccgcttccttatactgggtgcgttccggattcatactgggcatctccctgcagtcttcccagacggaccaccacttgctgaatgcaacgtaggtgatatccggatgcgttctgcttggcgtaaggggttccgggatccattttgccagtgcatcgggatcggtgcggtagacaatatttaagtattccgtaccgtaatgccagggatagcagcctaataaagaacacgttccttccggagacagcgggtagcaaaagccttttaaatctgttattttagccatggataaaccttctccttatctatattatgacagtattataacaatattgtgaaaacaagtcaataaaaaattgagcagaataaaaaagaaatctcaataaaatgcttaaattatcggcggaaaagagaggaaaatagaaaagtttgcaacataaaatgaaaagcaagaagagaataagacaagaatttgacaatatttataacactttatgtgaaaaattcataagatactattgacgaaacgatcattttttattatacttagacgcaaaagaggtgtgtttttataaactggtatcatttggtcaatataaattgacaaagctgtgataatgataagattatggaggaaaactggtatggaatttgatataacaaagccacattgctattactttaatgagatatgtaagattccccatggttcaaaaaatgagaaaatgctgagtgactggattgtgcggttcgccgtcgatcacaatctttcctatgtgcaggacgaaatgggaaatgttgtcatctataaaccggcgtcaccaggttatgagacacatcccggcgtcatcctgcaggctcatattgatatggtgtgtgtgaaggtgccggaatcaaatcataatttcgacacagatccgctggagctttatgtggaagacacacatttgagagccagaggaacgacgctcggtgcagatgactgcatgggagccgcatatatgctggatatcttatccgatgaaaaactcggccacccttatctggaatgctgctttaccgttcaggaggaaatcggactgtatggagccatggcgctgaagccggaatattttaaggcaagaaggctgattaacctggatggtgctggtgaataccggacctatacgacacttgccggatcacgcaatctggtgattgaaaagaaactgtccatgacggaggctcccggacggacgtaccgccttacgatacaagggcttttggggggacgcacgggagatgatatcggtaaagaacgggcaaacgcgggaaagctggcagccagggtgctctatcattttttggatgcgggaatcgtctgccggataggggatatgacggcaggcagtaaaaaaacgggaattgcagcggaggcggaggtcgtttttactgctgatgcagcgccggaggaactggatcgggtgttaagacggacagagagggcagtggcggaggaatatgaattcagcgatcccggtatttccatggttcttagggaaacggaggctgtaccggcggcgtcggaagaggagagcagggaatttattgagcttttgtatcttctgccatacggcgtcttttccaggtttttaaccctggacgggctgccctcctggtcggctaatctggggaacatctcggtaagcggaaaaaccgcggtggtggcgtatgcagcccgcagcccctttgaatctctaatggatgaagcggagtatacggtttcgcttctttgtgagaagtttcatgcggaaatcagagagaagcgtgattactacggctaccggtacttaaaagactcccccctgcgagataccatggaccgcgtattcttagaacagtacgggataccgctgaaccatgttgccgcccacggcgggaatgaatgcggagcctttaagcatatgttcccggacatggatatcgtaaccagcggtgctgtctacgcgaagcatcacaccccggaagaatacttagacttagaatcgtttgaccgttcgattcgtttcctgaaggcattcatcgaagagttataaaggagaagcaatggagtttgatctgacaaaaccgtattgccggtattttaatgaaatctgtaagattcctcatggttcgggaaatgagaggcagctcagcaactggctggtatcgtttgcaaaagaacatcagctttcctatatccaggatgaactttggaacgtcatcatttataaagatgccgccatgggatacgaggaccatcccggcgtaatcattcaggctcacatggatatggtttgtgaaaaaaaagagggatggatccatgattttgagacagaaccactgaaactgtatgtggaggacggccggttaagggcggaggggacaacgcttggagcggatgacggtatgggctgtgcctatatgctggctgtcctggcagacgatacgcttgcccatccatatctggagtgctgctttaccacacaggaggagaccgggctgacaggggcacaggcactgaaaccggaatatttcaaagcaaggcgtatgatcaatctggacggagccggcgagtataagacgtatatgagcatgggcggtggagagcagattacgctgacacgtcctgtcacgtgggatgaaaaccggaatcgtacataccgtctgactgtaagcggacttttaggaggccattcaggcggaatgattgaccgggagagggccaatgccggcaaactggcggccaggatatcgggctttctcattcgccggggaattgatttcaggctgtgtgattttcagggcgggacaaagcataatgtaatcatgcccagggcggaagttacgtttacttcgacggtggaggaaatggtactgcgaaagctggtctcacggtgcggacagaatatttcggaagagtttgaactgagcgatcctgatattacggtggagtttacggcggagagtccggcggaaagagccatgaaagaagaggacagccgggagattataagcctgatcgggctgctgccatgcggcctgcaggcgaggaatgcggcggtggagggaaacccgccggtcacttccgttaacatgggaattatttctatagaagaaactcaggcggtgatcgtgctctctgccaggagtgccctggagggagccgtggaagaactgaagcatcaggcggcgctgcttggcaggctgttcggggccagtgccgggtattccggttattatccgggctggaaatatgaggctgtttctgaacttcgggagattatgaagcaggtattctttgatctctatcaaaaaccgttaaactgcctgatcggacacgggggaaatgaatgcggagtatttaaaaaaatgcatccggacatggatatagtaaccagcggggcaatctacggaaatatacacgggccggaggaatttcttgacctcgcttcctttgaccggtcctggatacttcttacgagactgttaaaagctctttgacatggaaagtctcagagcgataccgctctgtgggaaaggaagataaagaaaaatgagagatgcaagagtggataagatggcacataacattgtgacctattcctgcaatgtgcagccgggagaaaacgtggtgattgaatcgtttggcaatcacaattacgatctggtaaaagccctgatccgggaagtgtatgcggcgggaggaagtccgtttctgtggattcggacgatggaactgcagagggagcttctgatgcagtgcaacagggagcagttaaaggtaatggaggaagtcgacagcctgatgatgagcaggatggatgtgtatatccgggtgaggggagaggaaaacacttcccagatgagcgatgtaccttctgaaaatatggcggattatgcagcaatttatcagcggccggtacacagcaggagaagcacggattcgaaatggtgcgtcatgcattatcccaccgatggtatggcacaggcggaatgtatgagtatggaggcactggaggactatttcttcgaggtctgcaccatggattattctaagatggagaaggcgtttgagccattgaaggaattgatggagaagacggatcgggttcgtctggtgggcaggggaacggatatttcattttctattaaagagatgcctgccattccctgtgcgggaaagcagaatataccggatggagaaatattcacggctcctttaaaggattctataaacggtgtgattacctataatacgacgggattttttgatggctttgccttcgaaaatatctgtttccggtttaaaaacggacgaattgtggaggccaccgccaatgattcggagcggctgaaccagattctggaccgcgatgagggctgcagaggaatcggggagtttgcgatcggagtgaatccctatgtggtaaaaccgatgaaagattccatgtttaatgagaagatgtcgggcagtatccattttacgcccggaaatgcttataaaaattgtgataacggaaatcactcctcgattcattgggatctggtatatgcccagacaccggaatacggcggaggagagatgtattttgatgacgtgctgatccgcagggatggaagatttatactgccggagcttctgggattgaatccggaaaacttaaaatgaagcggatatccacaaacttaagcggggaaacctgtttaaagtataaaaaagaggaggaactctaatgaaaaaaatggtttcattactgcttactggtgtgatggtactttccctggccgcgtgcggcgggaataaaagcacaaccagcacggtaagtacgacagagcccgccaaagcagaggcggaaaatgagtctcaaagcgagtccgcggggggagaaaaagcggccgctgaccagatcgtgtatggcgtgaccagtacaattgcaggtgatatgggattgaatcagtggtccagcgtcggaggggacaagccgattctgtttctgatcaacgcatattcgccgacctgctacgatcaggatgccctttggctgtgggacgaaacggttgtggattcccatgattcgaaatcgaatgacgatggtacgctgacctataccattaagctgaaggacaatctacggttcagcgatggttcccagattaccgccaaacattatgtggcgtatccgctgctgttttcttcgccggccgcggtaggggtcagcgcttacggtaccgcaggaaaggaatatgtgggacatcaggcgtataaaaatggcgagaacagcgttttcgagggtattcatctgattgacgacctgaccttcagtattaccgttgcaaaggattataacccttattactatggactggcgcttttaaatatcttcccgacggcttacgagcagtggcttccggaaggaaactgggatatcgttgatgatggaaacggctgttatttcaagggggatgtggagttcaacggcgcaaactgcggtgaagcaatcacagccggccgttatctttacgagggccggatctgttccggaccgtactatctggaaagcctggatacaggcgccggagaagcgaccttaaagctgaacgagtattataacggcaactttgagggacagaaggcacagattgagacgattattgtaaaagcggtgaactcggcgacgatgctggatgccttaaagacagggagcgtcgatctgattgacggaatcggtgagggcgatattatcaacgcgtgccttgacctggcggatacgggcgaatacggcgccgactgttataaatacagcggttatatgaagctgttctaccagtgtgactgggggccgacccagtacgagccggtccgaaaggcggttgcctatttaaccaaccgggaagagatgtgtcaggaagccacgcttggatacggcaatgtaacgaacggacagtacagctttgcccagtggatggcccaggatatggaagaggaactgagcacggagctggaagcttacgcctataatccggataaggcggtcgagatattaaaagaagacggatgggtttataacgccgacggcagcgattatgcggatggaagcggtgagatccgctataaaaaggttccgaaggaagaaacggaatatatgaacggctgcgtggaagtaaacggagaatggtacatgcctctggtactggagtatttaggccatgcggaaggcgatggaatcgagacagttctcgatgagcttctgaccatttatctatgtgaaaatgacaatacagccaaggccggtatgaagtttaaccgcaccgtcatggctgattccgagctgctgagctatttaaaccgccgcggtgcaaacggtgaagaaaagtatacacagcccagctatcacgtgatttccctggcctccggcctgggcgcggctaaatttgacaagacctacagctggaccttcgatgaaaatctgattgcaaataacaaaaaccggtatttcaaccatacgctggatgatctgtccatggatatgatatacggtgtggaagccggtgatgacgatacgtttaaggatatctggttcgaatatcagaaagaatttaataaaacactgcccgaggttcctttatttaactggacttactgtgcggtatacaacagtaagcttgatggatttaaggaaacgaatatctggagcttccagtatgcgattctttatgcgacagtaaaatagcaggataataaaagtgatgtgacccaaagcggggtgggaatgcgcctgccccgcttttgctgtttatgaataaaggctctttagagaaaggagggtatcgtatggcgaaatatatagggaagcggctggtgtatatggtcgtcgtcttttttgtcatctcgtttatcatgtacatgctgtataatatgatcccaggggacccggcagccatcgaactccagacaatccgtgacgaaatcagcgcggatgattatgaggaaatgtatcagcaggtgagagcacgcctgggactggatgaccctatcgtgattcgttattttcgatggcttggtttatatccttctgtagaaggaaatctggatggcgtatttcaggggaatctggggtactccacgatgtataaggacaatgtggtgaatattattgctgctcccttacagaacacactgtttttgaatgtctttgccacgatcctggcattggtcattacaattccattgggaattttctgcgcagtccggaaaaatggcaaatttgatcaggctgtgcaggtttttaccatcgtcggctacagcattccgatctatattatcgggctggtgtttatcttttttctggctgtgaaatttaagatttttccggtaggcggcgttaagagctcgggagtggaatataccgggtttgctgctgttaaggacagactgtactatatggcgcttcctctgattgttacgacgtttgccaacctgggaagtatgactcgctatgtgagggcggctatgatagatgctctggggatggattacatacggacggcccgtgcgaaggggcttaaggaaaaagtggttatctactctcatgcgtggagaaacgccctgcttccggttgtgacggttattatcggatggtttttgcggattttcagcggttccgttgtggtggagaacacgttctccttcctgggaatgggagctttgaacgtaaccggcttaaagcagagcgattacgaactggttctggccattcagctgttttatacgatcatcagcctggtgggcatcctgattacggatatcagctacggattgattgatcctcgtgtccgcgtagacaaataaaggaggaaacgctatggataagaaagagaaaagacgctgtcgcatttccacctggtttcggcgcatgttctttggccccggcaaggaactcagttttctggaagaagaacaggtgcagagccctctgcgttcgatggcgaagcgtttttttacgaataaaattgctatgacgggactgatcgtatttatctcctgtcttctgctggtcatgatcggaccgatctttctgcctttggatttatcgtattcagatgccacccagcagaatgtaccgcctaccaggaagctggcctcagttcccgaggagcttaaggataatttaaatgtgctgtcggtcggtactacctacgggatcgggtgcagcaaagatggaaaggttcacacgtggggatatacaaagattacggacaaaattgatttggcggagattcccgaagaggttcaggaagccaatatcgtgaatgtggccgcgggctacgatcatgtgcttgccctgtcggatcagggtaagctgtacgtctggggaaatacccgcttatctcaggcagatatccctcagaaagcacagcggaaggagttcgtccagatcggagccagcacgcagtactctgcagcactgacaaaggacggttacttatacctgtggggaaacggaaatactgcggatataaaagtaaaaaaggattatcagaaccatattgtaaagtttgcattgtctgattacgcctatgtctgtctcatggatgacggcagtgtgaagtataccggctacaatgcaacgacctcctatgcccagattccggaggggttagagagcggagtgaccgatattgcggcttcttccaccacgtttgcggcggttgacggcaacggtaaggttgccatttggggaaatgtgacgaatggggagaatgatgttcctgaatttgagggagagatcagggagatatacggcggccgttatcactacacggctcttctcgatacgggaaaaatcatctcctggggaaataaccatttcggccaggcaaaggtgccggataatctggcggaagggaaagactgcgttcaggatatttacgtcggctattatcagaattacgccgtgaaggaagatgggaaaattgatacctggggacttaaggggtatatcatgggaaccgacaacctggggcgtgacgttctgacacggctggtaaacggtggaagagtgacgatgacggtcggggctgtctccgttatcatcatgctggtgattggaattatcgcaggcgggctttccggttactttggaggacggctggatgtggtactgatgcgtattgcggaggtaatcagcgggattccgttcctgccgtttgcattaattctgtcttccgtggtcagctccagcgtgtctctgacccagagaatgtatttaataatggtggtgctgggcgtcttaagctggccgcctctggcaaggctggtacgggcgcagattctggcggtccgggagcaggagtatgtcatggcggcgaaagccatgggggtgagggaaactacgatcgtattcaaacatattctgccgaatatcctttctgtggtactggttaatattacactggattttgcaacgtgtatgctgacagagtcttccctttcttatctgggattcgggattataccgcccacgcctacctggggaaatatgctgaccggagcaaacaattcggtggtaatccagcagtactggtggagatgggttttcccggctctgatttttggtatctgtacgattgccattaatctgatgggagacggtttaagagacgctgtggacccaaaatcagaagaaagataaggaggtggaatgatgccattacttgaaatgaaggatcttcataccttttttcatacaaaacgtggaattgtgaaggcagttaacggtgtatcctactcggtggaagcgggtaaaacgctgggagtggtaggagaatcgggctcgggaaagagtgtttcagcaatgagcatgctgcagctgattgacggaaacggctatattgccggcggcgaaattatttttgacggacaggatcttacgaagcttggccgccaggacatgtacaaaatccgcggcaacgatatctccgttatcttccaggaaccgatgaccagtttaaatccggtttttaccattgagaggcagatcagtgaacctttcatcatccaccaggggatgaataaggcgcaggcggccaaggaagtagtaaaaatgctggccgatgtaaagattcccaatccggaggtggttgcaaagcagtatccgcaccagctgtccggaggaatgcgccagcgtgtcatgattgccatggctctggcatgcaagccgaagcttttgattgcggatgagccgacgaccgccctggatgtgacgatacaggcgcagattttaaacctgatgaatgaactgaagagggaacacgggacttcgattctgttcgtgacccatgacctgggcgtcattaatcagatggctgacgatgtggcggtcatgtactgcggccaggtggtggagctggcgccggctgatgtactgtttgcgccggactgccgtttttctcacccgtatacggaggggctgatgttttctgttccgaggctggacacgccggcgggaaaaaggctggaggcgattccgggttcggtgcctcatccgctggatctgccaaaggggtgtaagtttgcaccacgctgcaaatatgcgggagaacgatgccgggcagaggaaccgggacttgtgaatgtgtccgacaggcagcaggtccgctgtttctatccgttaaaggaggagagacatggaaaacagaaataaggtgctgattcgagtcagcaatttgaaacagtactttcctttgaagaaaaaggggcagtacgttaaggcaaatgacggtatctccctggatatttatgagggggagacctttggcctggtgggggaatccggctgcgggaagtctacgcttggaaggacgctgctgcagttttataaacagacggatggaagaacgatgtattatgggcgcaatgtggaagagtttgcgccgggatacgtaaagaagacgatacgcagtctggaaaagcgccgcagggagtaccgggaactggaagcaaagaagagggaactgcaggccgtgtatgaaacgatggacgagaaacaaaagtatgcggagaaggagaagcttgaccgggctgtaaaggaagcgaacgatgcatttttagatatggccagtattgtaggcggcctgatgacggcggaggatttaaggcctgtccaggatgtttttctgcagaaatatgaaatttccctgagggcgaaacgtgcgaaggagaaattccggaaagcgaaggtgaagctggccgattcagagtataaggcaaagcttgccaaagaagcggggaagtcagggaatgacaggcagaaaaaggtggacgaggacgctgcaaaggtaaaaaaagcggaggacgagattgtcgccatcgagagagaactggctgccatcctggaaaagatcgaccagatgagaacgccttattccgaagacgaagagtttcagcgtattgaaacataccgggataacgggattgatctcgcccggcttacttataatgagatgcggctcctgcgcagcgatctgcagctgattttccaggatccctattcttccctgaatccgaggatgacggtagggcagattatcggagaggggatgctggcccacgggatgtttcggaaaaatgacggaaggatgcaggaggaagtgctgcgggtcatggaagaatgcgggctggctccgtatttccttcaccgttttccccaccagttctcaggagggcagagacagagaatcggtattgccagaagtctgggcgtaagaccgaaatttgttgtctgtgacgaggcggtttctgcgctggatgtatcgattcagtctcaggtgatcaatcttcttcaggacttaaaggaaaaagaaaatttgacatacctgtttattacccatgatttatccgtggtaaaatatatcagcgaccggatcggggtcatgtatctgggagcaatggtggaactggcgggagcccaggagatttttgaaaatccggggcatccgtacacggaagcgctgcttgccgctatccctacgacggatattggcgacaataagaaggaactgcagattctggagggtgacatacccagtccggttaatccgccaaaaggctgcaagtttcatacccggtgcaagtactgcacggaaatctgtgagcaggtcgttcctgactgggaagagatcagtcccaatcattttgtggcgtgtcaccataagctgaaaatcaataatcagaaatgacagtatccaaaaaacgtccaggtgaatccggggtggtgattgaatcataggtaatccgtaaaaaagagaggcggtggcagcatggttattcaggaaaagatggataaagccatggaatatcatcataaaaagcagatgaaaaaggcagagaagtattgtgaccaatacgggggagaccggctggaggtggagaagggggatgtagcggccatgatgctgtcagcattcctcatgctggtaccggttgtacttgttattctgctgattgttgtcggtgcaggttattttttcctgctgcattaaggcagcagaggtttggctgtatagaagggccgctttcaatgagatgttatgaaagcggcctttttgctgcagtcacccggctttatgcttatattccttaaccgtacacccataaaattttttaaaactcgcgctgaagtactgactgttgcggtagccggggaaggggagatatcaattattcctcaggagaaagaagtcatcggacagctggctgtctttgacggtgaagagttgttataaaaacggtatattgcgtggctgcagcagaaagacatacagattatgattgaaatcaatggatttccatagtctgtatgtctttttctttttgggggcaagcaatttgcatataagaaaaattgcattataaaaatttttgaacatattttacaattaatgcttgacatctgcgctgtgatcatatattatataaatacatcatataacgttatataacaatatataataatatcgagtggaggattcattatgagacaagagcacatcgaccagattaacacagcagtggcggcagtagcggccaaggaagttattaatcatttttactttgtagcgtgcggaggttcccaggccttcatgatgccggcccagtacacgttcgaccgtgagatttcgattccggccagcatctactcttccaacgaatttgtgcacagagctccaaaggcattgggcccggattccgtagtcattacctgttcccattccggcaatacgcctgagacagtaaaggcaacggaagtcgccagagaaaaaggtgcgctgaccatcgccttatctcacttagaggactctccattatggaatgcagcggaatatccgatccattatgactggggaaaagatgctgatgcaagcgatctgaacaaggctgtgttatactatttaatgttcagtattttaaatgcagtcagcccatgtgagaaatatgagaagggcatcgcttctgtggcgaatttgaacgatgcgatcgagaaagccaaagagcagtacgcggataccattaaggagtggggaagcaagtataagagagagcagctgatctataccatgggcagcggtgcctgctacggcgaggcatactccttcgcaatctgtctgcttatggaaatgcagtggattcattcccacgccatccattccggcgaatatttccatggtccgtttgaggtgactgattttgatgttccgttcatcattatcgaaggtgtcggcgcaacgagaccgctcgatgagagagcttacaacttctgccagaagtattccgataagattatgctggtagatgcggaaacctttgatatgacgggcattgacgaggaagtgagagagtactttgccccgcttctggccggagcggtacttcgttccctggcagacgcatttgcgtatgagagaggtcatgatttaagtgtgcgccgctatatgtggagaatggaatattaataggaacattgacagaataagagggaacgacggagttttggcaggcaggctggaattccgtcgtttttagaaaaaggaggatatcatatgaggaaaagtatcaggaaaatcatggcgcttgcactggctcttaccatgggtctgtctttaaccggatgcggcggatcaggcagcggaggagatgcgggaacaaccgcggcaccggatcataagacatcagatactgccgcagcaggcagcgaggcaaaagacggctccggagagaaggttgtaatcaattttttccaccgctggcccaatgatccgaagaattccatgttccaggagctgattcaggaatatatggccgagaatccaaatgtgacgatcaacatggactgcattttaaacgatcagtacaaagagaaaatccgtatggtagttgcaacggacgaaattccggatatcttctcttcctggtcgggaacctttgcgaaagagatgattgattccggtaatgtcatggagctgaacgatatttatgacggtgatacagagtggtcttccaagatcgccagcgccagcgtcgacggctttacctttgacggaaagatctacgggggtccgtggtcacaggatggcaaggctttctattataataagaagatattcgcagagaacaacttagaagtgccgaagacatggaacgagtttatcgcagtgctggatgcactgaaggcagccggttatgaaacaccggtggtagagggattatccgataactgggcaattcttcactatctgggaaccatgaatcagagaatggtagatcctgctgtgatcgcgaaggattacgatgcggcaaccggtgaatttacagatccggcttacgtggaagtgcttgaaaaatggaaacagctcacctcctacatgggtgacacctgcgtagccatcgatcatgagactgccagaaatacatactttgcaaccggtgaggctccgattatgtatttgcagtttgcagagattacgatgcttgaaaaggtaattccggaaggctttgaatacggcttcttcaatttcccggcctttgaagacgggaaaggcgatccggaaggactgaccggcgcaccggaaggatttatgatcagcaacaaggctaaaaatccggaagagtgtgtgaagttcttaaagtggctggtcagcaagaagggcggagaggctctgacaacaaagagcggagagatctccagtgtggctggtgcagtggatgaaaccaatgcccttccggcacagctggaggcgatggagattatcaagtccgcatccacgctggtaccgtggtttgacaatgcctgcgacgcgtctgtttataccgtatacggccagggggcacaggcgatcgctacgggcgatgagacaccggaaagtgttatggaacaggtaaaggaggctgcggctgccttacattaataagagtacagttctgtccggatacctccatcggggggccggacagagctgaaagaagaaatgggatggatcataacattccgccgaatgcatatgaggggggactatccgcttgaaaagagagaaaaaaagaaatttacaggcactggcatttgccgtaccagctattctgattctgggaatattcgtatattttccgctgattgaaaatttcatatatagttttcagtcctttaccctgtcttccgcaacgaaggagtgggtggggttcgataactacaggcatctgttttccgataagatcattctggtctccctgaaaaacaacatcctttatgctgtcatttctattgtcattcaggtgggattcggactcgtgctggcggcggtactggaggatgtcgcgttccataagtttgctcctgcactgcgcagcatctattttattccaaccgttatatccatgacagttgtatgtctgctgtttgattttgtatacaatccacagatggggctgttaaacagcttcctggagctggtcggacttgacggtttcacgagggtatggctgggaagcaagaagacagcgatgtatgcggtgattgcggtttctcaatggcagagtaccggatatgttgccatgctgttcattgtggccatccagaaaatccccagggatttatatgaggcggcagaggtggatggcgccggaaagctgaaacgcttcttctacataacggtgccgcaggtacgccagatgttctttgttaccatgattttaacggttgtcggtgcatttaccgtgttcaacgaaccgtatatcttaactggaggcgggccgggaacggcaaccatggtgctgtcgcttcacatgtaccagaccggtttcgttaagaacaatatgggctatgcatccacgatcgccatgttgattttcgtcataacggcaattttgtcttccgtgcagttcgcaagcttcgggacggaaaagggggatcgctgatggagaaggtgaaagtaagaaaaagaagagtatatggacccggcgagatcctctggctggcaatcctgttcctcttagccgccctgattttgtatccgctgttctggattctgatgtcgtcttttaaggactacaacggcatttacggtgatgtatgggggcttcccgatatctggcacgcggaaaattatatgacggcctggaacagaggaatctcccagtattttgtcaacagcctgattgtaacagcctgtacgctggtcggagtggtctttgtatcgacattttcggcttttggtatctgccagatgaaaggcagactgggaaatgccatattcctgttctgtctctgcggcctgctgttatcccctcaggtctgcctgcttccgctgtttatgctgttaaaaagcctgaagcttaaaaatacgctgttcgccatgatactgccctacatcgcgttccgtctccctgtctcaattatgctgatccggtcatttttcgtcggaatctctaaggaactggaggaggcggcgaccatcgacggggctacgctgatgcagatttacggtcatatttacttgccgctgtccaaaccgatcatctcaacggttatcatcatgacggcatactatgcgtggaacgagttcgtatttgcaacgatctttgtggacagctcaaggcttcgtaccattccggtaggactgatggtattccgtgacggcctcatgacggaatggggcgtcgtattagcaggtatggtcatctcctgtctgccgattatcgttctctttctgctgatgcagaagagcttcgtaaggggtatgaccgccggtgcagtgaaaggatagagatatgaaattaattgcaattggagataatgtaacggactgctatatggacgagggtgtgtattttcccggcgggaatgccgtcaatgtagcggttaactgtaagagaaacggagcggagcgcgtcaattatattggtgtattcggggatgatgagcgtgcggattatattaaggagtgtctgacgaaagagggcgtgacttacgaccggtcgagaaaggtatatgcccacacggcacagccccgggtgtacttaaaagacggtgaccgtgtcttcgctccgggactgcgtgatagctgccagcacttatttgccataaaaatcgttccggaggatatggagatcataaaggagtatgatatctgccattccagctgttactcgaatctggaatatgaacttccgacgctgaaggagatttgcagcgtatccttcgatttttccgataagcgggatgaagagtatttagagcggacgtgtccgtatctgacgtacgcatttttttcaggctccgacttagaggaggaagcgtgcattgccctgatgagaaaagtccatgaactgggaacgaaaattgtgggcgtgaccagagggcataaaggagctgtcttctatgatggagagcgggtataccgccagggaattaaaaaagtggacgccatcgacaccatgggggcgggagacagctttattgccggttttttgaccgcgtacggagacggcaaagggatggaggaggcgcttgactatgcggcttcccgttccgcggccacctgtatgattcggggaggcttcggctatcctcataaaatggaataataaggtcccttcgcctctggttaaaaaggttgctttgactgattttgtgagctataattgatcataggcattagatgaagaagggaacaggagatgcagatatgctaaatcagaacgcattgactccgttatatgagcagctgaaaaacgcaattaaagaggatatccaggcacagatctaccggccgggcgactggatgcccagtgaggcggaactggaggaaaagtaccaggtaagcagaattacggtccgcagggctgtgaaagagctatgtgaggaagaaattctggttcggaaacagggtaagggaacgtttgtgctgagctgcggagttcagagccggttcgaccagctggccggatttcatgattccatggaaagccagggacgggcagtccggacggagatactggagaaatccatcattttagtgaagccatcctatgccaatgatttgcagattgcggtggatgacaaggtggtttatttgaagcgtattatgtatgcggatgagattcccatgatgattgatatgtcttatattccgctgaagcgtttcccggggattttcgaaaagatggagggcgatgtctctgtttttcagcttctgcgccaggagtatcatgcaaagctggaccgttattataaggtgttaaaggttagaaaggcatcaaaggaattttctgagtatttaaagtgtaaggcgggcgaccctgtatttgatatcttcaagattacgtataatgacgaaggggtggcacagcatatttccatcagcattttaaaaggagagaatacttcttatgtgatatccaacagcgagaatgatcagatgacacacagtgggatcagctggaggatataagaacaggacaaagaagacagggcgtgtaccgattatgatccacaccctgtcttttttatcttatcaactttttatggaataccgtgactcatgattctgtcatcattcgctctgacagaaatgttttcacttcgtcctctggcatcggtttcgcgtaataatagccctgaatccagtcgcagcagcagtcttcagcgaatagtctctgctcctcagtctcaacaccctctgacacaacacgcatgcccagatcgtgaacggagcgggtaaggcttttcatcatgatggccgttttctggtctttctgagccgcccacagcaggctcttgtccagtttgatcacatcgacatccatgctcagtacggatacaaggttgcagtagccggttccaaagtcatccagactcacttccaccccctttgtatgcatgagatcaataaattcttccagttcctgacggttttctgcgagaacgctttctgtgatttcgatcttgatcatccggtatggaatcccgtgactttcgatgatggagatcaccttttctgccgggttgtgttgggaaaactgtacgccggaaaaattaacagtgacgctttccagcatcgtgatcccgctttccagcaggtcgtgaataaaacggcataccgtatccagaacatagtaagtaatgtccacgatcagtccggtctcctccgctaagggaataaattctgagggatataaggggccaaggggcgtggccggcaggcgcagaagcgattccgcaagagtgaaacactgcttctccacagaccagacaggctggtaatatactttgaaatctccccttgtcagggaatccttcaggatatcgatcaccctaaatcggcgtttgacgtgatcgagcatacccgggccgcagtagcagatactgccgtttttaccgtctttggcgacggaaaccgtgtattccagtgcattaatgaggtcttccatggtgtccgcgcttttgggatagttgatcacggcggccgccattccgatcatacagcgaaagtcgcggctgtcccatggctggctgaaccggtcgtctatggctgtaaccagacgaagaagggtttccttatccggttccggaatcaacacggcaaattcatccccgttgtagcggtaaagctgatacggctttaccgtgttgcgcaggtatgtacagatggttttcaaaaattcgtccccgttctgctgaccgtaggtgtcattcacctgtttgaagttcctcagcgaaatgaggagtaccgtgaaggaggaatccctgtgccgtttgatatgaagctgcagggaatttaaaaattccttatggtttggtatccccagcagataatcgatcgaaatctgcttattctgcagatacagataaaggatcagcagcgcgcaggtggcagcagagccggagagaatgatttccggaaagatttgctggatgatgacaaccagagcggcaatcaacggaaaacaggccagaatatttcgaatcgtgggatccactctttttcccagcgcaatcaccgtgacacaggtgaaaaggcagtaaatatagaagacaatgtacgtggtaatgatcagcggtccctgtgtataccgggcagcgaggcttaaagaaaacagccagccggtaaagggattggttaaaaccataagcagatagacggcggccggaagcagtaaaagcagccaccgtttcggaaaataaggctgattttcataaagtatggaaagcgcataataaaaatacgtgactcccataagcggagtggcgataaaatagatcgtcgtgaccggccagtttacatacagcggaattactcctgtattttgaatacagattgtagaaataatattcgacgtcatagccaggaacgtcgttaagaaacaaatctgaaacagtttgtttttcaatgttggcaacgaatggctctgtctggagtagttccagatgatgcagagcatgacggttgatatgcattcagcagcgatattccatttcacggtttttccctcaatttcccccagttatacttatccctatcttatcatgacgggatggtgcgcgcaagcggaaagtcagaacaaatctataataattcttatcgatcaggtataataaaattattgtgcagaataaatacttatctttcatgaatttactgcgtatggtacaatgatcccagaagcaacagagaaagggggaccatgaacatgagtgtgaccgtagcggatttactccggctctcctccctgcgaaatgcgcgggtggaggcgggaaaaggcggcctgtcccgcatcgtggcgtctctgtccgtgctggagtatgccgatccggatcagatggtggatgctttttttagaaatgatgaatactatggcagcgaaatcgtcataaccggatttatgaataatccggaggatgaggagcggcagtgcgctgtgacgaaacggctggccgaggccggtgaggtgggcctgattctgtattacgtcggcctctttatgccgcgtataccggaagcgatgaagcggatcgccgatgatcataattttgttctgatcgtcatgccggaaaaacgtatggatttccggtattccgacgcgatcagtgaaatcatggaagccattgtcaaagaccggttaaataatacggccttcgtcggtgaacttctcgatcaggtggcgcgtcttccggagcatcagcgctcggtgggaaccatgctccggatgctcagtgagagaatcatggcatcgctccttttaaccgaccagtcgttccgcgttttaaacgaggcagtctggccgttaaatcaggagaggacgctgagccgctttttgacagaggggacgctgccggagatggggaatgagagaaccgtgcacatcgcgggtacggaatacttactggcccgatttccgatcccgcttcataaagaccgccatatggaactgttcatttttaaagagggagagccgctgccggcggtcgtgcggcagcaggtcgcccgggctgtgcagctggcggtcaatatctggagtacgcagcatgatgaggtggaggtgacggaactggtccgcgcaatcttaaaagacgagcccatgaagatgcgtcggctggctgatatttttcatattgatgtggcctctatccattccatgttgatctttcatatggaagcggagcggcagaaactgaacggtgtctctgttttgaaaggcctttccggattgctgtcttttttttataagacggtggttgcagacacttatgagggagagatcgtgatcttcgtggagggaccgcagtctctcagtgaagaaaaggaagtgctgggggcaatccggacatacatggaaccgtttaaggttttttataccattacctgctgtaatcacctggctgatactgctgcggtgcgggaggcgtttttgctgcaccgggattatatagaagatgcgattgcaatttttccggagaaggaggcgtaccgccttcaggaactgggatttgcgagagaatgccgggacaggatcgggagaggggaagaggcggtgcaggaagccttaaagccgttagaagcccttcgggatgcaaaggaggagaaggaggggatcaggacgctggaggtctatctcctggatgcccagtgcagctacttaaagacaggagaactgctctatctccataaaaatacggtgaaataccgcattcagcgtttttcagatattttgggctaccgcgtcggagatttcccggatacattttccctgtactgcgcggtggcggtaaaccggctgctgactttttgtccaaagtgacaaagaaaccggctgattttcgtttttatgagggattcatttttctgcacgaatcctttatgatagtagaaaggtcaacgaagacgttggcctttctgtttttcagaaagagagcagtaagtcaggaagataaggagtgtggcggtttatgcgtacaatcggtttgagtgaaattgaagatattgccctgggcgcttccctgctgggggcgggcggaggcggagacccttacataggaaaactggtagccatgggagcggtcagggaacggggaccggtgacgcttctggacccggaagagattccggatgatgcgctggtggtccccattgccatgatgggagcgccaacgattctcggtgaaaagggcgtagggggaaaagagtacgaagtgctgtatcaaatgatttcccaatactacggcaaaaagatttatgcatttatgcctattgaggcgggcggcgtcaactccatgcttcccatcgctgctgcggccagactggggcttcccatggtggatgcggatggaatgggaagggcgttcccggagcttcagatggtgacatttaccatggccggaatatcggcgacacccatggctctggtggatgaaaaaggaaacagcgtgatctttaataccatcacaaatcagtggaccgaggagctggcacggtcggttaccatgagctgcggaggttcggtctcggtttccctctactgtgtggaaggctccattcttaaaaagcacgcagtgaaagggattgttaccagaagccagaagctgggagaggccatacgcagagtaaaggagataacggatatgactcctgaagaacgctttctgcaattttccgaagggtaccgtttgttcaaggggaagattgccgatgtgcgtcgggagactaatggagcatttaacctgggccgggttgccatcgagggaatcggaagtgaccgggggaaaaaggcggaagtagtatttcagaatgaaaatctgtctgccgccgtggatggcgtcattcttgccaccgtgccggatctgatctgtctggtcgacacggagacttttattccagtgactacagatgccttaaaatatgggaagcgtgtccttgcagttggactcaaatgcttcgaggcctggagaagtgaggctggccttaaactggtggggccgcgttattttgggatagatacggactatgtgccgctggaagaacggattggaggaaatgcagatgtataaattaggaattgacgttggagggacgaatacggatgcggttctgattgacagcgctcgaaatgtggtagcagaagtcaaatatccgacttccggcgatatctatgacggaattctgggggcagtgcgcgcctgtcttaaaaagtccggaatcaaccgggcagagatcagccaggccatgctgggaaccacccagtgcaccaatgctattgtggaaaggaaaaccctggcacctgttggaatcctccggattggggctccggcaaccctgggcataccgcctatggtggactgggaagaggacattcagaaaattgccgtggattatgcggttgtgggaggcggcttcgagtatgacggaaaagaactcgctccatttgaccgggaagcggcctgccgtttctttgaaggactcaagggaaaggtaaaatccgtggcgatctcctgtgtcttctccactgtgagaaatgatcacgaactggaggcggcggctctgtgccgggaagtgctgggtgaggaggtccatgtgtcaatttccagtgaaataggttccatgggactgatcgaacgggaaaatgccgccattttaaatgccgcattatatgaagtggcggaacggtttacgaccggatttgcaaaatcactggaggcagagggtgttgcggaagccagagtctatctgtcacagaatgacggtacactcatgacgatggaatatgcgaagaagtatccgattctgacaattgcctgcggaccaaccaactcgatccgtggtgccagctacttaagcaatttgaaggatgcaattgtgatcgatgtcggagggacaaccacggatcttggcgtgatccaggctggttttcctcgggaatccggcgttgctgtgaccatcggcggcgtccgtacgaattttcgcatgccggatgtaatctccatcggtcttggaggcggatccattgtcaggcagcaggaggacggaagcgtgacggtaggtcctgacagtgtgggataccggattacagaaaaagcccttgtatttggcggggatactctgactgccacggatgtggcggtaaaactggggatggcagatattggagataagtcgaaggtagagaagctgagtgttgatacggctaaaaaagctatggaagtgattcgttccatggtcgaggacagcatcgatgcaatgaaggtgtccagcgcagacattgatgtgatcctggtaggcggcggctccgtcattattcccgcggaccggctggccggaacgaaatctgtggtgaaacctgattattttgggactgccaatgccatcggatcggctatatcaaaggtaagcgggacattggagcagctgattaattacgatgagattccacgtgaggcggcactggagcgggcaagggccgaggcggtggaactcgctgtcgaggccggggctgtccgtgagacagtggaaatcattgaagtggaggatgtgccgctggcgtattatccgggaaatacgaaccgtgtgaaagtgaaggccgcgggagatttagtgatggcggaaccgtgaaaaacagaaagcgcagcagaaatcctataacgtaactgagaactggacggagagaagccggcccgcgcaaaacacggaccggcttctttcgtagagtaaaccgtaatcgatagtcgggatacccctcccaacaggctgctaagcggctccgcgaaagaaaaaataaaaaatgcgaaaaaagtgttgacttttgtcaaatgctttggtatgatatacctcgccgctgaaaacggcggcaaacttttccgaaaaacgtccggcctgaccgctgagagagttttgaagaaaatgaaaaaagtggttgacaaaaatgaatcactgtgataagatataaaagttgctgctgacacagatcgacagcaaacgcactttgaaaacagaagattgaacagtatgtaaaaccctgaaaattctaataaaacaagccattgtttgatggctttgaatgagaaaattcagaacgaatacaagtattgtatacgaaccaaacaacaagtaaaacgggaaataaattagctagttagttgattttgaccccggatcaaacgaatcatttaacatgagagttcgatcctggctcaggatgaacgctggcggcgtgcttaacacatgcaagtcgagcgaagcggatcttcggaagttttcggatggaagaggatttgacttagcggcggacgggtgagtaacgcgtgggtaacctgccttacactgggggataacagttagaaatgactgctaataccgcataagcgcacagggccgcatggtctggtgtgaaaaactccggtggtgtaagatggacccgcgtctgattaggtagttggtggggtaacggcccaccaagccgacgatcagtagccgacctgagagggtgaccggccacattgggactgagacacggcccaaactcctacgggaggcagcagtggggaatattggacaatgggcgaaagcctgatccagcgacgccgcgtgagtgaagaagtatttcggtatgtaaagctctatcagcagggaagaaaatgacggtacctgactaagaagccccggctaactacgtgccagcagccgcggtaatacgtagggggcaagcgttatccggatttactgggtgtaaagggagcgtagacggtttagcaagtctgaagtgaaagcccggggctcaaccccggtactgctttggaaactgttggacttgagtgcaggagaggtaagtggaattcctagtgtagcggtgaaatgcgtagatattaggaggaacaccagtggcgaaggcggcttactggactgtaactgacgttgaggctcgaaagcgtggggagcaaacaggattagataccctggtagtccacgccgtaaacgatgaatactaggtgtcggggggcaaagcccttcggtgccgccgcaaacgcaataagtattccacctggggagtacgttcgcaagaatgaaactcaaaggaattgacggggacccgcacaagcggtggagcatgtggtttaattcgaagcaacgcgaagaaccttaccaagtcttgacatcccactgaaaacactttaaccggtgtccctcttcggagcagtggagacaggtggtgcatggttgtcgtcagctcgtgtcgtgagatgttgggttaagtcccgcaacgagcgcaacccttatccttagtagccagcgagtagagtcgggcactctggggagactgccagggataacctggaggaaggtggggatgacgtcaaatcatcatgccccttatgatttgggctacacacgtgctacaatggcgtaaacaaagggaggcaaaggagcgatctggagcaaaccccaaaaataacgtctcagttcggattgcaggctgcaactcgcctgcatgaagctggaatcgctagtaatcgcgaatcagaatgtcgcggtgaatacgttcccgggtcttgtacacaccgcccgtcacaccatgggagttggtaacgcccgaagtcagtgacccaaccgcaaggagggagctgccgaaggcgggactgataactggggtgaagtcgtaacaaggtagccgtatcggaaggtgcggctggatcacctcctttctaaggaagaagaagtaggggttttagatactgttgagtcttgtgtttcaaagaagataaaaataattgaataagaaacgccaagaaagactggaaatttctggtgccgatgcgcttaggggaaacacccgtacccatcccgaacacgatggttaagacttaagcggccgatggtactatgctggagacggcatgggagagcaggtgggtgccagattatttatgggggtgtagctcagttgggagagcacctgccttgcaagcagggggtcaagagttcgaatctctccatctccattcggtatgaaggaaggaagccgtaaggtaaccgggagtcatgccagcatgtaccttgaaaaccacatattgaatatatctagatagattcttttaagggagtttaatcccgagaaagagtaaatcaagacatccgaggtgttatatcgtaacagatataaccgaaaattataaactcgttgttgctgtaacgtacagcgataacaaacctaagaccagagattcaacgctatgaatcttagatgagtaatccgcacccgcagatgaaaatcgaactggttaagctaaaaagagcgcagggtggatgccttggcactaagagccgatgaaagacgtgataagctgcgaaaagcttcggggaggagcaaatatcctttgatccggagatatctgaatggggaaacctggctgagcaaacctcagtcggcgtatggtgaatccatagccatacgttgggaacccgctgaactgaaacatctaagtaggcggaggaaaagaaagaaaactcgatttccagagtagcggcgagcgaaatggaaggagcctaaacctgggtgcgtgcacccaggggttacggactgctataagtgactcgtatggtaacagaacggtcctggaaagaccggccacagagggtgaaagccccgtatgtgaaaccagaagagagcgggcatgttccaaagtaccacgagacacgagaaaccttgtgggaagtcggggggaccaccccccaaggctaaatactccttagtgaccgatagcgcatagtactgtgaaggaaaggtgaaaagaaccccgggaggggagtgaaaaagaacctgaaaccctgtgtttacaaactgtggaaccacattttaggtggaaccgcgtactttttgtagaacggtccggcgagttgccgggactggcaaggttaagcactcaaggtgtggagccgaagggaaaccaagtcttaatagggcgttgagtcagttcaggcagacccgaaaccgggtgatctacccatgtccaggttgaagtttccgtaaaaggaaatggaggaccgaacgcacatccgttgaaaagggtggcgatgaggtgtgggtaggggagaaattccaatcgaacccggagatagctggttctcctcgaaatagctttagggctagcctcgtattagtttagcggaggtagagcactgaattcttaagggggcgtcaaagcttaccaagagatatcaaactccgaatgccgcataaatgatgtacgggagtcagactgcacgagataagttgggcagtcaaaagggaaagagcccagaccaccagctaaggtcccaaagtgcgtgttaagtggaaaaggatgtgggatttcgaagacaactaggatgttggctcagaagcagccacacattcaaagagtgcgtaatagctcactagtcgagaggtcctgcgccgaaaatgtccggggctgaaacacgacaccgaagctgtggaattgacttatggtcaattggtagaggagcattcttaactgcggcgaagcgttaccgtaaggaggcgtggagtgttaagaagagagaatgccggaatgagtagcgagatggaggtgggaatcctccaggccgaatatctaaggtttccagagtaaagctgatctgctctgggtaagtcggggcctaaggcgaggtcgaaagacgtagtcgatggacaacaggttgaaattcctgtaccgcgtattatcagaactgtggggacacagaaccgaagccaaacccgggaatgaaaagaccggggcaagcgccggactggttagactggcaaatccgtttaacaacaggaaagcgtgacgcgtaccgaacaaaagtagggaagttggtataggggctgtcaagaaaagccgctattgtgtaatacgtgcccgtaccgtaaaccgacacaggtggatgaggagagaatcctaaggccggcgggagaagcattgttaaggaactcggcaaaatgaccctgtaacttcgggataaagggtgcccacgagagtgggccgcagagaataggctcaagcaactgtttagcaaaaacacaggtctatgcaaaaccgaaaggtgaggtatatgggctgacgcctgcccggtgctggaaggttaagaggagaggttagagcaatcgaagctttgaatttaagccccagtaaacggcggccgtaactataacggtcctaaggtagcgaaattccttgtcgggtaagttccgacccgcacgaaaggcgtaatgatttgagcgctgtctcgacaatgcacccggtgaaattgaagtaccagtgaagatgctggttacctgcgccaggacggaaagaccccatggagctttactccagcttgatactgggattcggtactgcatgtacaggataggtgggaggctaagaaggtaggacgccagtcttactggagccattgttgggataccacccttgcggtattgggtttctaacctgcggccatgacctggccgggggacaatgtcaggtggggagtttgactggggcggtcgcctccgaaagggtatcggaggcgctcaaaggttccctcagaatggacggaaaccattcgaagagtgcaaaggcataagggagcttgactgcgagaccgacgggtcgagcaggtacgaaagtaggacttagtgatccggtggtataaagtgggattgccatcgctcaacggataaaagctaccctggggataacaggcttatcactcccaagagttcacatcgacggagtggtttggcacctcgatgtcggctcatcgcatcctggggctgaagtaggtcccaagggttgggctgttcgcccattaaagcggtacgcgagctgggttcagaacgtcgtgagacagttcggtccctatccggcgtgggcgtaggatatttgagaggagctgtccttagtacgagaggaccgggatggactgacctctggtgtaccggttgggtatcaaacccatggccgggtagccaagtcgggaagggataaacgctgaaggcatctaagcgtgaagcccccctcaagatgagatatcccatcgcaagagtaagaccccttgaagacgacgaggtagatagggcagaggtggaagtgcggtaacgtatggagctgactgtcactaataggtcgagggcttaaccaagttggtttaggaaaaagaggaaataagaacggatgaaagatatgtacaatgtgtggttttgagggtatatgccccaagagaaaacggagagatgagagtcgcttcgtttttatagaataagcgcgagtggctcagtggtggagtacaaccttgccaaggttggggtcgcgggttcgatccccgtctcgcgctctgagaataagagaaagaaagcggatttccagtgatggagatccgctttcttgtattatatgccaaaatgaatcatatacttctgctcatcaatcgcctggctgatcttgtctgcaagtgcaatcaactggtgatcgtgagtgattcttctgtcgctgattacgatatcctgcaatgcggggagtgactccggcgggattaaggtaacgccccatctgtcaagggcaaaggaggggcgcttcagggactgtgtataggtcctgatcagcagcagtctgggccaccagtcgctgatatacttgtcgtcatcgatggcgacacagtgatatgtttctggctcatagatattataatttttttccggatctatcgcatcgataattccaaattctgtttttatcataagtttacctgacgattgttataataacgatctttctgattctgctgaattttcttttttattgaactgatactccgagaccagtcgttagcgcgtacaggggataatcgtttcgatgaatcgatcagcggcttcctcgtcggcagcgattgaaaagagatagatcaccttattctcctggttccgcagataaacgttcatcttgagcttttccggtatgctgcagaccattttctgataagtctgcccggctacagttacgggctgcgggactgaaggggacaaatcgtatttcccccagaatgcagagaatacattgagatcatctgtgagaatctgttcaatcggatcgctgttatactggatgacgactccaaagagcgactgctccggcatgatggccagaaaatcgtaatagctggggatataatcatgggcagacagcgcgttcagctcttcggcggtcagcgcaaaggtatattccggcagcgttatacggattccggcccatggatgctcatagacggactgttcaaaccggccagaaggaagatggacgaacagagggtctgccggcggagtctccctccaggctcccgaaggctcaaaacggtaggtatgtccctcgatatcgagcgtagtatcactcaccatcattccatcggtgtcaaaataataccagccatccccgtctttgatccagccgccgcaaatcagagagccgtcagagagagcgtactgccaccggctgccattgtgcagccagccggtatggttcgtttcactgcccgtatctgcggcggcaaaggtttcctgaagccgtgcaggaaaatgcacagcggtaagtgccagagacagacagattccggcggaaatggtgaaaagacgtttttttaatttcatgaaaatgcgatcctcctgtcagaaagtactgtcttgtgtgttgtattacagtaagtgtatctcttttcagaatatctgtcaaatacggaaggctgaccggctgtcgttttaatttacagaagatgtaaaaaccactataatcagaatagaaacaatagacagaagctgtgtactgagagataagcgttaagacctgcagcggcaggagagaggtgggaacgtgagtgaacctgttgcaaagcgccagatgtttgaatatgacggagataatccgtttcatatctataatcttccctattatccgtcaattggtgatgaactgttgtttaaccactggcacgaggaactggagattgtttatacattacagggaaacagtctccattatattgatggaacctgcatcaggtcgcagccgggaagactgatcgtggtgaattcagaaagcagtcacaacatcataccggaccgttcggtatatgggaatggaagaaaagtggtgattgccctgattatttcgcgggagtttttagaggaggtatttccggattttcggaatatgtattttctgaatgaaaaggaggtgacgactccggtcatcagagagttgatggtgacgctgtctcactttggtgatggaacagagctgtcacgctacgagaaaatatatagaaaggggctggtgcttcagctgctgtaccacatcacgcaggagggggtggcggagaagaacgtgatcctgccgcttaataatcaaaagaatattgaacggctgaaaggtgtccttcaattcatcgagaatcattacatggaaaagatttctcaggcggagattgcagaaaaattctacttttccagggagtatttcgcacgcttctttaagaagcataccggtatgacatttacggaatatctgacaaaataccgccttcagaaggccaggatgcagctgatggcttccgacagcgggattttggaaatcgccctgaacaatggattttcggatgaccggagactgatactggcgtttaggcaggagtacggtactactccgttccaatacagaaaaatggaaagaaataaagaaaaatgacggtaaaaaggggacgcatttttgggtacaggtcaatatatggatgtttttggataaaatacgcaaggaattaccgtccgctctccgctataatgaaggatataaaaatcaagtgacaggagaggggaagcaatgggaaggaagaagaatggattatcatggacggaaaaaatctcttatggtatgggagactgcggagcaaacgtcacggtggcgctctgctccacatttttaactgcgtattatacggacactgtaggaattgcggcagccgcggtcggaacaatgatgctgctggcccgggtgtttgacggtattaccgacatcgtgatgggggctgtcgttgacaggacgaagacacgctggggaaaagccaggccatgggttctttggacggcaccgcttatggcgatcgcactgatcctggaatttaatgttccggggggtttaagcggtaatggaaaacttgtttatgcatatttgacctatatttttcagaactgcattgtgtatacagcgaataaccttccctttaacgcattgctgtcacgcatgacactcaatgttcaggaccgcgcttctgcggctactacgcgttttgtcatgacgcagcttacaacgctggttattaacgcggtgacggcgactctgctgtctacggccggatggttctggctgtcaattatttacgggattgtaacctttgttatgtgtctgatctgctttctgggaaccagggagcatatcggagaagacgcggaaaccggtgtggtgcaggtggaaaatgttccgttgaaaacagcgctgccggcacttttaaaaaacagatatttttatattcagagtctgctgtttatgtttctttatattggcatcgtcagtaccggttccacaacgttctatttttgcaacatcgttttaaacaatctgggttatttaacctacatatccatggctaccacaattccggcaatcatagtcaatcttatgcttccgaaagtcattcggaaatacggaaagtggaaactgatggttagcggtgcatttctgatggtactgggcggcctggtggtcggcgcagccggctccagcttccctctggttcttctggggctgattataaagggaaccgggatgggaccaatcatgtcaggaatctttgcgatgactgcggatgtcgtggattacggcgaatggaagaccggagtccgctcagaggggctcgtcaactgctgtacttcctttggaatgaaggtgggaatcggcctcggctccgcactctgtacctggatcatcactatgggcggatatgacgggactgccgctgtacagcctgcctctgccgttgccatgattcggttcggattcggatacagcggcgccataatcgcggtagtatgcctggctctgtgtttcatgatgaatatcgataaatatattgtgacgattcagcatgacctggaggcaaaacgaaatacaaaatagagaggtgaagagaacgatgtcagaattgagtgataccattcgtaaattatttaaggaaggtgatgaccggcgggatgccggtcttaccaccccagagggaatcctgcgttatgatgatatcgtctatggagaggatgcaggatggcaggttctcgatgtataccgtcttcaaaaggaggaagggccgctcccggttatcgtgagcgtccatggcggcggctgggtatacggcgataaggagagataccagtactattgtatggacctggcgcgccggggatttgcagttgtaaattttacttatcgcctggctccggaattcaagtatcccgcgtctctggaggataccaaccgggtatttgcatgggtgcttgaccatgcaaaggagtatggctttgaccggtcaaggatattcggcgtgggcgattcagccggagcccacattctgggtctttatgcggcgatctgtacgaacccggactatgcggcggcgtacccttttcagccgccaaagggttttgtgccggctgctgttgcattaaactgcggtgtctaccggacgccggtttccgacgacgaaaaggaccagagcaatctgcttatggcagatcttctgccggagaaagggacgagagaagagtttgagaggatcagtctcgtgaacttcgtgaccagtcaatacccaccggtatttcttatgactgcttccggtgatttcctgagagatcaggcgccgcttttggcggagaaactgatggagtttgagattccgtttgtataccgttactttggaaatgcggaccagcctttgggacacgttttccactgcaatatccgtctgaaggaagcatcacgctgcaatgatgaagaatgtgagttttttcgagaatactgctgattcctgtctgcagaatcaggaagatccggctggcactggtctgtatttaccgatctgtgctttgccggtatctatcatttcatcggcaagcgctccggcatctctgtccagtcccatcctgcaccgcatggccaattccagggccatacccagattaattccatatatgaccgtgatcttcgggagtatggcggtcagcctgactgcgcatttataaggagatcccccgatcatgtcacacaatattaggatctcatcgcaagtgtgcatgccttcgacggcatgcttcaaatgctctgttaacaggtcctcattctgtccggcttcgaaatcgacagcggtcagcagatcctgatgtccaatcaacagttccagtgcgctgaccagcccggcagcaaactgaccatgtcccgtaattaccaatccaatcatgagtctctccattctccgcgaatttacggcagcttaacgtcctgtccggttatcatttatatcatatactacatattctgaaaacgcaattcccgattgatttcttacgggaagccggcgaagaaacgatctgtaaaccagtatacagaaacggccggatgtggtacaatgcaggtatgagtttcagcacatacatggtacgcatacggcctgtttcagccgttttgtgtgctcaggacaaggaggaatggtttatggaaagagcgattacaatcagtcgtgaatttggaagcggcgggcgtgaactgggagtgaggctggctgagagtctggggattccgttttacgataaggaattgatttccatggctgcagaggagagtgacatgccggaggatgcgttccttcattatgatgagaacatgccattgatcaaagatccgctggaccgccatttctactcaccattttcgtctatctatcaggttcccatgtcggaccagatctttttagcacagtccagagtgatccggaagctggcagagcagggaccctgcgtgatcgtaggacggtgtgcggacatggttcttgagaacagtgtcaacctgtttatttacgcgaaaatgaaagaccggatcagacggatgaattctctggagaccggagtggatccggtgaagatggagagcagaatccgtgaggtggatcggaaacgaaaggattactatcagtattacaccggcaatgaatggggaaaggctcagaattatcatctctctctggaaagtggtctggtaggggtagacggctgcctgaaggcagtgctggcctatctggagtcggtgcagtagaacagcagtcatagaccgcggggcagaaaaccgccctgcggatcggaaatgatagaaaaaagcatcaggcgttccatgtgtgacagcatggaacgcctgatgtgtcaaaattgcctgacgaattaccggtaactgtaaaatcgtgaatttttatcgcttttcttgtattatgtccacctttgtactataatggtaacattatgaattttgatggaagaatgaggtggaaaggaatctatgcggtttgctgagagaatggaccggttcggagaaggaatattttctaaattactggaaataaaaagacagaaggaagaacggggagagaccgtaatcgatttaggcgtgggagcgcccaacataccgccggccaggcatattaccgatgccctgtgcagggcggctgcggatccgaaaaattacgtctatgccatcagtgaccagaaggaactcttaaaggcggtggcacagtggtatgagcggcgttacggcgtgaacttaaatccggatacggagatctgttctctgctggggtctcaggagggactggctcatatcgcgctttccatagctgatgagggcgatatcgttctggttcctgatccctgttatcctgtgtttgcggatggtccgcttctggcgggtgccacccttttttatatgcctcagaaaaaggaaaacggatatgtcatcgatgtgaaggagataccggaagaggtggcggaaaaggccaggctcatggtcatctcttaccccaataatccgaccacagtcatggctccggacagtttttatgaagaggtaatcgcgtttgccaaaaagcatgacgtgatagttctgcacgacaatgcatacagcgaactggtattcgacggcaggacatgcggaagctttctacgctttccgggagcaaaagaggttggtgtggaatttaattcgctgtcaaagacttacgggctggccggcgcgagaatcggtttctgcgtgggcaatgaagaagtcgtgagtcatttgaaaatgttgaaatcaaatatggattacggtatgtttctgcccgttcagatggcagcaattgcggcggttacgggggatcaggcatgcgtggaagagacaagaaaggcctatgaacgcaggcgggatgccctgtgtgacggcatgacagcgattggctggaggatggagaagccggaggctacgatgtttgtgtgggcgaagataccggataactttaccgattccagttcttttgccatggagctggctgaaaagtccggacttctggtcactccgggaagcgctttcgggccttccggcgagggctatgtgaggctggcacttgtccaggatgaagatgtgctgaagaaagcagccgaactggttgataagagcgggatcctgcgatgaagatgaagattacgaagagacagtgtttttggagtgctgcggcagtactctatgtgctgtttattttctccaattccatgaagaacgccgatctctcctctgcggacagcggtgcggtgctgcggctggtgcagcaggtattgaccgcaggaggtgtggacggaaccattattacggaacatgtgatccgcaagaccgcgcattttacggaatatgccgccctggggatactgctctgcctctgctttcagacgtatgtcctgccgctgcacagccgtgttctgtctcaggtgctggcaggctttctggttccgtttgccgatgagacgattcagctttttgtggctggcaggtcgggacagatcagtgatgtctggctggactgtgcgggagtggcttttggaactatcttatttgcagcagcagcttggatcgtaagcaggacaggagcgaaaaaacgtgataaaaaattacaaaatagtacttcagtatgacgggagccgctatgacggctggcagaaacagggcaacacgggtaatacgattcagggaaagctggaaggtatcctgcttaaactcaccggaaggccggtggaggttcacggatcgggaagaacggacgccggagttcatgcgctggcacagacggccaatttccatgcagataccggtatgacggaagaccagatcagggcatactttaatcagtacctgccggaggatattgccgtgctctctgtagagaaagtgccggacaagtttcacagcaggttaaatgctgtacaaaaaacgtatttataccgaattgagatggggccgaagaaggatgtgttcgagcgaaagtactgttatgggctcggaaagcagctgtcggcagaccgcatgaaggaggctgcggcctgtgttctgggggaacacgattttaagagcttctgcggcaataaaaaaatgaaaaagtccacagtcaagacgatttctgatatcacaattgaaaaagaaggaacgaaactgttgatccgctatacgggaaacggttttttatatcatatggtcaggattcttacgggaacgctgattgagatcgggctggaagagcgcagtccgcaggaaatgaaggaaatcctgctgaaactggaccggcaggcggccggttttaccgcaccgccggaaggtctgtttttagagcgggttatgtatgaggacagggagtaacatgacagattttttagtgaagacatttgttaaggatttcgagaatacgggagacactggagtgaggacggagtatggcctgatggccagtactgtggggatctgctgcaatgtgcttttatttgccgcgaagctgtttatcggactgctgatcaacagcatttccgttatggccgatgcatttaacaacttatcggatgcagcctcctccatcattggttttatcggcgtaaagatggcaggcaagccggcggatgaggaccatcccttcgggcacggccgtgtggagtatattgcggcgtttatcgtggcgtttatcgtcatccaggtaggcttttcactgtttaagacgtctgccggcaagattctccatccggaggagatgacgtttaagtatatttcgattgtaattcttttgatgtcggtctgcgtgaagctgtggatgggcatgtttaacagaaagctgggaaagaggatcaactcttccgttatgatggcgacggcggctgattccatgggcgacgtgggcactacctcggcgaccatactctcgattctggtttatggaatctgggggatcaatatcgatggaattgtggggctcatcgtgtcgcttatcgttatgtgggcgggtgtcggaattgccagggacacgctggcgccgctaatcggagagcccatcgatccgaagctctaccgggagattacggaatttgtagaaagctttgacggcattgtgggaagccatgacctgatcgtacataattacgggccttccagaagtatggcatccatccatgcggaggttccgaatgatgtaagcatcgaaaaatcccacgagatcatcgattatgtagaacgggaagcacagcgccgtttcggaatttttctcgtgatccatatggatcccatcgagacaaaggacagcagggtaacggaatttaagaaaatggtggaatcgatcgttatgagcatcgattctaagtgcagtttccatgattttcggatggtggaaggtgaaaaacagatcaatctgatcttcgatctggtcgttccaagggattacgacagggcggcgagagaagcgatcaggaaagagataacagagaaggtagcagagcgggatagcaggtgctgtctggtcatgacgacagaaagcggctttggcgtggaagaataaggaaacaaaaaaatttccataatatgcaataagaagacagcatcctgcattaacttagtagaaaggaaatcgactccatgttatttatgggtatgatgagccttgatgggccggaagattacggccggttaagcgatgaggtgctccttaataaggttggaacaggagaccaggaagcgttcagacaattatatcagaatacagaccggtcaatctacgggtttatcctgtctattgtaaagaatccccaggatgccgaagagatcatgcaggaaacctatataaaggtatggacttccgctgcgggatataagtcccaggggaagccgctggcgtggatgtttaccatagccaggaatttatgctatatgaagtttcgcaatcagaagcatgagtctgatatcgcgtttgaggatctggaaggcgaagagacgggggaagtatgccctgagattgaacaggcggcggataagctggttttggccgcggctcttaagatattgaaagaggaagagcgggagattgtccttcttcacgcgactgcaggcatgaagcaccgggagattgcagcatcgttaggcatgcctttggctacggtactttccaaatacaaccgcgcgatgaaaaagctggaaaactatttaacataaaaagagcagggagtttcccgcaggtacggtgccggaagttctgcatctgcaaaagaaaggagtgagcgttcatgtttcacaaaaccgacagacaactgaacagaaaacaactgaaagcacaattgaagtctgcggtcatggacctgactccgaatgtgctggataaaattgatttaaccatgcctcagatgacagcggaggaactgcatgaggaggccgggagggctgtcagatccatcgctgtgatgcgcagacgcatgcgtgtgatggcggctctggcagcagcgtgtctctgcatggtggcagccgcaggaggcacatatacgtaccgcaacgggaaagtggattccgtgatcggcatcgatgtcaatcccagtgtggaactgtccgtgaaccggaagaaccgggtactggaggcagagccgctgaacgaagatgcaaaagccattatggaagacatgaatcttaagggagttgatctaaatgtggcggtgaacgcagtgatcggttccatggtgactcatggctacctggatgatctggacaatgccattctggtaactgtctccaatgacagtatcagcaaggcatcggctctgcggtcctcggtcgtgaatgatattcagagttccctggaagaaaatcaggtgaaggctgtggtatacgaccagcaggtgattgaagaagatgatgtaaaggcgctggcggatgagtacaggatctcttatggaaaagcatatttcctgaaggaactgattgatcagaatccggcgctgaccatggaggatatggagaagctggcgccactgaccatggaggagattgcgaaggagatcacggaacgttcctacgcagtcggaggccatgcaggcgtgagtgaggatatgacgaccgcggcgcagacaaccacgcagccggttacgactgttcccgttacaacagaggcggcgacagaggagacgacgactgcggaggaatctgagtctgagacaggtaatcagaccacagcggccccggttccgcagacgaccgctccggttccttccggcctgccggagatgacgacggaagcgccgacgacggaagcacaggtgccggtgtcagacgcgaagatcacgattgattacgtcgattatgagaacggggtggttacggtcaatttcaagacaaaagtgaagtggaagaatcctaccgtatcggtaaaggatgagggaggaaccacctactccgccatggtaggcgatacagacagttccacctgtgagatttacgtaagcggcctggaaggcggaacttcatacacgtttgtgctcggcggaatatctccgaagaacggaaagcagacaacggtgaagggtacctttgagaccccggtcatcggggatggcggagcaaacgaggaaccggtgacgctgccggaaacagaagagacaaaggaaacggaaacacagcctcagacggaggaatcgtctgaggcttctgccacatcaccggccgagacagaatctgtaccgcagacggagagcaccccgcccaccgagcctccaacggaagcgcccactgaaccccggacggaagcgccggctgatacgcctccggcggtttgatacggattgtgtcatgtgacgcatcagaaatatgacctaaactgtttgatttgaaggaataataaagaaaatagaaaaaatatgaaaaaagggcttgacgaggagaaaatggtatagtataatacaaccgttgtgttgatgggctatcgccaaatggtaaggcaacggactctgactccgtcatttcaaggttcgaatccttgtagcccagtaaaaaaagcttttaagcatgagaattctgtgcttgaaagcttttttgttattgctggaaagaggacttacttgtacagccggttcagcggtttctgaattcgctcggctgaattcctgatatttcttgaaaattccccttaaagactccggcgtgatgccgaatttttgataagattggcggccttctctgtaaatgggaggatacaaggttagtcaaaaaaatgcaaatgacagttcggaattgtctatgttgcaaaagggattcttatgatatgatgaatttatgctaaaaagcgtgttttatcaatagaatctggacatggcgtttcgacttcggaagccgttcagatcagtaaaatgttcctataatttttgaaaggaaggtcatttatgaaatttacggaaggttactggtgtacaaaaaaggaaataaccccgctctatgcgacagagttcgcagacagccggagagagggggatgaactcatcctctacgcgccgggaaagcatattgcgggaagaggggactgcttaaacctggggatgcttacggtccgcctttccagtccaatggaagatgtgattaaggtttccgtgagacattttgaggggactgcatacaacggccccttcgctcggatccatcagacctcccctcatgtgacggttgaggagacggaggatgaaatccgctatcagagcggccgtacgactgcggtcattgacaagcggccaaactgctggggaatccgcttccttgacggggaacgggagctgaccagtacaggataccgcaatatggctcatatgacaaaccgggatacaggaaaaacttatatggtggagcagctggctattgatgtggatgagtgcatctatggactgggcgagcgatacaccccgtttgtgaagaacggccaggtggttgaaatgtggaatgaggacggcgggacagcgagcgaaatcacatacaaaaacattccgttttatattaccaacaaggggtacggtgtgcttctggacaatgaaggggacgccgcctatgagatagccagcgaaaaggtggagcgtctgcagttttccgtggagggggagagactcgattactatgtgattaacggctctaccccgaagggaaccatttctaaatatacggaactgaccggtaaaccggcgctgcctccggcctggtcctttggcctttggctgaccacctcctttacgaccaattatgacgaggggacgacgtccggatttatccaggggatggcggaccgggatattcctctgcatgtgttccattttgactgctattggatggaggcgtatgagtggtgtaattttacctgggatccaaagacatttccggatccggccggtatgctgaaacggtatcacgaccggggattaaagatctgcgtgtggattaacccgtatatcggacagaaatctcctctgttccaggaaggaatggagcatggctatctgatcagaaagacgaatggggatgtatggcagaccgatatgtggcaggccggcatggggctggtggatttcaccaatccggatgcggcggcttggtatcagggcaaattaaagacgcttctggatatgggagtggactgttttaagacagattttggcgagagggttccggtgaaggatatcgcttattacgatgggtctgatccggtgaaaatgcataattattatacttatctctacaaccaggctgtattccagcttctggaaagagaacgggggacgggggaagccgtgctgtttgcccgttccgcgacagtgggaggccagcagtttccggctcattggggcggcgactgttcggcggcttatccgtcaatggctgaaactatacggagcggcctctctctggcctgcgcgggctttggtttctggagccacgatatcagcggttttgagaatacagcgccggcggatatttacaagagatggtgccagttcggcctgttaagctctcacagcaggcttcatggttcttcctcttaccgcgtgccgtggctgttcgatgacgaggcctgcgacgtgctccggaaattcgtgaagttaaaatgtgcgttgatgccgtacctctatcggcaggcggtaaaagctcatgaagagggcattccaatgatgcgtccgatgtttgtggaatttccggaggaccgggcctgcgaaccgcttgataagcagtatatgctgggcgattcacttcttgtggctccggtatttaaagaatcaggagaggtggaatactaccttccggagggcgtatgggtgaatttacttaccggaacgactgtcaaaggaggcagatggcagaaggaaacacacgattacttctccctgccgcttatggtacgtcccggcagtattgtggcagtcggacaggaaagcagcaggccggattatgactttgctgacggggtacgcttccttctctggctcccggaggagggaatgactgcggagaccggagtaacggatctgaacggaaatgtagtcatgactgtgtcggccggcagggcagacgggaaaattacgcttcgggcagagagaacgtccgcaggcgtatctgcggacgtttccacaaactttacgtttgaagttctgggagaggagaagttggaagtagttgtaaagtagaggaaagaaaggctttattgacacagcgagattaaaataataaaaaagtgcttgactatcacaccaacatcttgtataatgaatttcgctgtgttaatgggctatcgccaaatggtaaggcaacggactctgactccgtcatttcaaggttcgaatccttgtagcccagtcttgatgaaacccgcaggagctgtcctgcgggttttgcagtattttatgagaatgtcatcttataaattgcagaaacatgaaaagaagcaggaatccataaggaactgcttctttttctgcagcagaatcgttccttcttctggacaagacaggcaaaatgctttataatgttacttaattttgatgagaggtgcagcatgtacacatttggcagcaggatacggtacagtgagacggatgaatacggaaaactgacgcttacaggtattatgaattacttacaggactgttcgacgttccagtcggaggatatcgggcttgggatttcctatctgacagaacaccatcaggcgtggtggctctcttcctggcagattgtgattgaccggtatccggctctgggagaggaagtggtcatcggtacatggccctatgattttaagggtttttacggataccgtaattttaccatctgcgatcaggcaggaaattacctggtgagggccaattccgtgtggtttctgtttgatacggagctgggccgccctgtgaaggtgaaggaagagaatatccgtggatacggcagaggcgatgagaagcgcctggagatggagtacgcgccgcggaagatcacggtacctgcagactatgtggagacggagtgcgtgacgatcgccaaacaccacatcgacacgaatcatcatgtgaataatgcccagtatgtggagatagccagggaggtgcttccggctgaaatcgaggtcggagaacttcgggtggagtataagaaggcagccgtctgcggcgatgtggtttatccgcatgtcagccggacggatgaaggatacacggtttctctctgtgatgagcagggagcggcttatgcagtgatatggctgcggggaaaaacgagagaggatataatatgatagaactgggaaaagtgcagaccctgacggtgcagagggtcaaggagttcggcgtatatttgggggagggggcagcttcagaagcttccgttctgcttccgaagaaacaggttccggagggagcgaagccgggcgatgaaatcagcgtatttatttataaagactcggaggaccgcctgattgcaacgacagggatcccgaagctttcggtaggagagacagcgatgcttccggtaaaggaggtcgccaaaatcggagcctttctcgacatgggactggagaaggatcttcttcttccgttccgtgagcagacgcataaggtacgccagggcgaatctgttctggtagcgctgtatgtagataagagccagagacttgcggctaccatgcgggtttatgcctacatgagcagtgaatcgccttatcagaaagacgatcaggtgacgggaacgatctatgagatcaatgagaatcttggagcgttcgtggcggtcgatcataagtactacggactgattccaaagaaggagctctttgacgattatcatgaaggagacacggtgtcggcccgggtgaccaaggtgcgggaggacggcaagctggatttaagcccgagacagaaggcatatttacagatggacgatgattcggcccgggtacttgccgtaatcggagaccagttcggcggagtgcttccctttacggacaaggcggcgccggaggtgatcaagcgtgagtttcagatgagcaagaacgcatttaaacgtgcggttggccatctcttaaaagatggaaaagtaaggattaccgagaaaaccatagagatactttaatagagtggaaaggaataacaggaggattgttttggactcgatagactattataataagtatgcggcaaaggtgttcgaagagacagtggatcaggatatgtcggagattagaacggaatttttaaatcttctggaggaaggggatacgattcttgacctcggatgcggctccggaagggacagcctgattttctacgaactgggatacgatgtgacggccatggatgcatcagaggagatgtgtaaactggcggagattcacacagggctggaagtactccatatgacctttgaggagatggatttcgacagcgtgtttgatggaatctgggcctgcgcttccctgcttcacgttccggaaaaggaactgtctgacattcttacaaagatagcaagggccttaaaagacagtggaattctttatatgtcctttaagctgggagactttgagggcttccggggagagcggtatttctgtgactacacagaggatgccatggaggaagtactgaaagacaacgaccggtttgatgtagtaaagatctgggaaaccgaggatgtccgctctggtcattctgacacacggtggctgaatgtcctggtcagaaaacagtaaatcttacgaaaatataaacaagacagcgcgaagaaattcggcgctgttttgtcgtttccgaccaaatccgggacggatgcggaacaggttagagatattagacagaaatgcccggccggaactttcgatattttgacgtttcagtcattttttttattgaatatacaaattagccaaaaggcagaattggattttggttaattgccatatggtaaaagaagtggtgttcatgtatgattaggtcagtaaatgaaacagacagcagccaggggccgcgggtctgggaagaagaacaaacacatatttttattcaaaattaggaggattaagcgatggcaagtttatcattaaagaacatcacaaagaaatatccgaacggattcgaagcagtaaaggatttcaatctggaaatcgcagacagagagtttgttattttcgtaggaccttccggatgtggtaagtccacaacccttcgtatgatcgctggtctggaagatatttcctccggtgaactttacatcgatggcaaattaatgaacgacgttgagccgaaggacagagatatcgcaatggtattccagaactacgctctgtatccgcatatgaccgtatacgataacatggcattcggtctgaaactgagaaagacaccaaaggacgagatcgacaagctggttcacgaagcagcaagaatccttgaccttgagcatttattagacagaaagccgaaggcattatccggtggacagagacagcgtgttgctatgggacgtgctatcgtacgtaatcctaaagtcttcttaatggacgaaccgttatccaacctggatgctaagctgagaggccagatgcgtattgagatctccaagttacatcagagactgcaggcaaccatcatctacgttacacatgaccagacagaggctatgacacttggtaccagaatcgtagttatgaaggacggcgttgttcagcaggttgattctccgcagaacttatacgacaagccaggcaacaagttcgttgccggattcatcggagctcctcagatgaacttaatcgaagcaaccgttgctaagagcggaagcgacgttactcttacattcggcggacacaccatcgcacttccggaaggaaaagcgaagaagttagagggtgccggctatgttggaaagactgttgttttaggtatccgtccggaagatttacatgatgaggaagcattccttgcatcttccccgaacagcatcatcgatgcaaccatcagagtttacgagctgttaggtgctgaagtttacttatacttcgatgttgatgacgctaactttacagccagagtaaatcctcgtacaaccgcaagacctggcgatactgtaaagcttgctcttgacttaacaaagatccatgtattcgataaggatacagaactggtaatcttaaactaaattttatgaaaatttaagcaggcgagtgctatactcgcttgcttttttttagtttttgcattaatatagaataagggaaaatttacgataaggagagtgtgccatgatttcgaatcaaatacttcaaacgacgattgaaggattaaaaggaattacgagaattgatttatgcatatgtgatacggaaggaaaggtattggcaacaacatttcctgatgcagaagattatgagagttctatcctggcatttgtggattctccggctgacagccaggtaattcagggataccagtttttcaaggtttttgatgagcaccagttagaatatattcttcttgccaagggaggcagtgacgacgtatacatggtcggcaagcttgccgccttccagattcagagtcttctggttgcttacaaggagcgttttgataaggataactttattaagaatctgcttctggacaatctgcttttagtggatatctacaaccgcgccaagaagcttcacattgagacaaacatcaagcgtgtcgtattcatcattgagacacagcatgagaaggatgtcaacgcattagagacagtccgcaatttatttgctgccaaaacgaaggattttgttaccgcggtggatgagaagaacatcatcctggttaaggaagtccgggacggcgagacatacgaggaactggagaagacggcaaataccattctggacatgctgaacacagaagccatgactcaggttcacgtggccttcggtacgatcgtcggtgagatcaaggaagtatcccgttcctacaaggaagccaagatggcgatggatgtaggcaagatcttctacagcaacaagaatgtagttgcatacagcaagctgggcatcggacgactgatctatcagcttccgcttccgctgtgccgtatgttcatcaaggaaatctttgacggcaaatctcctgacgagtttgacgaggagacgcttaccacgatcaacaagttctttgagaacagcttaaatgtttctgagacatcgagacagctctatattcacagaaatacgctggtatacagactggataagctgcagaagagcacagggcttgatctgagggtatttgaggatgcgatcacattcaagattgcgcttatggttgtgaagtatatgaaatatatggagaaccaggactactaaagagaaaaagcagcgcggctgtgtgcgcagcttaagcattgggggaagagacaggaaagaatctgcgctgtgcaggcacaaaatcagattctttcctggctcttttcgtagagcgaagcggagcatggccggtactgcaaaggagcggaacgagataaaggaatgaaacaagacttcagaggaaaaagatgatcgaactgtggaatgtaaataaaacatacgaaaccggaaacaaggctttgcgtaacatcaacataacggttgaggacggagagttcgttttcatcattggacggagcggttctggtaaatcaacgcttttaaagcttttattaaaagaggtggaaccgacctccggcaagataatcgtgaacgatatgaacctcgggaagatgcccaggcgctacattcccaagtaccgcaggaggctgggaatgattttccaggacttccggctgttaaaggaccgcaatgtatacgagaatgtggcatttgcgcagcgtgtcatcggcgcttccgccaggagcatcagggaatcggtaccaaccatgctgacaatggtgggactttcttcaaaatacaaattttatccgcagcagctgtcaggaggcgaacagcagcgtgttgcgatagccagggcactgattaaccgcccggagatacttttagccgacgagcctacgggcaatttagatggccataactccatggaaatcatgaagctgttagatgagatcaacaggagaggaaccacggtaatcgtagtcacccacagccatgaaatcgtagaccgcatgaagaaacgggtgattaccatggatcgcgggaccatcgtgagcgacgagaaaaagggcggatatacacatgaggattagtacattttggtattgcctgaaacagggcgtaaataatatatgcagaaatattctgttttcgcttgcttcgatcgcgacgatttctgcgtgtatttttttgttttgcctgttcttttccattgtagtgaacgtacagtacgtggttaagaatacggaaagcacggtgggaatcaccgtattttttaatgaaggtacaacggatgagacgattgccaagttcggcgagacgctgaaagcgagaccggaagtgaaggagattaaattcacctcgtctgaggaagcctgggaagagatgaaggtcgattatttcggagaggataagatggatctggcggaagggttccgcgacgataatccgcttgccaattcttcttcttatgatattttcctgaatgacttagagaatcaggaagaatttgtcacctggctgaagagccagaatatcgtcagaagggtgaattattccagcaccgcggcggaaggcatcaccagcatcaataaggtgattggcgtgctgtctgtaatgataatcggtgtacttctggcagttgcgatattcctgatcagcaatacgatctcggttgcggctgcattccgcaagcatgagaacgaaattatgaaattaatcggagctacgaattatatgattcgtgcgccgttcgtggtggaaggcgtgcttttgggaatctttggagcagtgattcctctcgcggccatcttttacctgtaccggaatgcggtgggatatgtggtggagaaattcagcatcctgtccggcctgttccagtttctgccggtggagcagatcttcccgtatatggcgggaactgcgatggcactgggcgttggaatcggattttttgtaagtttctttacaattcgtaaacatttaaaggtataaggggaactgtatatgagatacagaaaacggatgggagcggccatagtgaccgcagtacttaccgtatcctgtatatttccttcctatggtacaaagactgatatggatgcggccagagaaagcaaatcgaatctggaaaacgaaaagaaagagatcgagaagacgcttgaaaaactggaggcgctgaaatctgataccgtatcctacgtgaatcaactggatgcagagctgaattccttaaataagcaggtaactgctttgaactcccgtgttgcggcgaaggaagccgagatcgcgcaggccgaagcagaactggccgcttcgagggaaacagagcggcgtcagtatgaaagcatgaagcttagaatccaatatatgtatgaaaagggtgagaccagttatttagacttgttgtttaagtcggccgatctcacccagctttttaatcgtgcggaatatatcagtcagattgcggcatatgatagaaaaatgctggatcagtatgaagcagccagtgacgaggtggctgccagagaggcggacttaaaggcagagcatgaggaactggtaatacttaagactaatacggaagaaaagcagaaggatgccgaacgtctgatgaatgaaaagacggcggaactgaattcttataacagtaaaattgcagccagcgcgggaagtctctcagaactggaaaaagacatcgctgcacaggaagataaaataaaggctattgaggctgaaatcaggcgaaaagaagaggaagcgaagaaggctgcgttagcggcagggcagaagtataatacggtcagtattgggaatattaacttcatatggccatgtccctccagcagcaggatcacctcctcgttcggagaccgggaatctccgacggaaggcgcgtcgtccagccatcagggggtcgatatcggcgcatccacgggcagcagcattctggcagcagcttctggtaccgtaaccatatctacatacagttattctgccggcaactatatcatgattaatcatggaggaggcgtctccaccgtatacatgcactgctcggaactactcgtttctgcagggcaggaggtgacgcaggggcaggtaattgctaaggtgggctctacaggttattctaccggcccccaccttcattttggaatccgggtgaatggaagttatgtgaatcccataaactatgtaagtccataacccgaaagacaaggagaataacattggaaaacaaaaataaattttggaaaggcgcccttgtcggcgcacttctgacagcttttgcaggtttgatcatcgtgggcatgtcccttggaatctttctgatcgggagaaccgcgattgacgggccgcagcaggctgctgaatccaaccaggcggaaaatcagaatggatcgctggatgtaaaccggatcacaaagaagattacgacgctgcagcagattatagacaaatactacctcttcgatgaggacacgactcaggtggaggactggatctacaagggcatgatgttcggtttaaatgatccgtatacgacatactatacggctgaggagtaccagaagctgaatgaggacacggaaggcgagtatcatggaattggcgtcatgatcagccagaacagaggcaccggtctcattacggtgatcaaggtgtttaaggatactcccgccgcagaagcgggcatgaggccgggagacatcctctataaggtcggcgacatggaagttacaggaatggatatggacattctggtaaaggactacatcaagggaaaggacggctccgaagtggagctcactgttttccgccaggatgagggcgaatacgtcgatttgaagatggaacgccgcaatgtaacggtgcagaccgtggaataccagatgatggaagacagtgtgggatatattgcggtaagccagttcgatgtggtgacggcggatcagtttaaagcagcggtcaatgatctggaaaaacagggtatgaagaagcttgtggttgatttaagaaataacccgggcggcgtactgggcacagtggtggatatgctggattatattctgccggacgatttaaccatcgagggagataaggatctggtgcgcaccaatccggaagcgacgcttctggtgtatatggccgataagaacggcaagggagagcaggaatacgcatctgacggtcattctctcgatattcccatggctgttctggtcaacggagagtccgccagtgcctctgaggtatttaccggagccatgaaggattacggcagggcgacgattgtgggaacgaaaacatttggcaagggaatcgttcagaacctgatccctctggacaatgggactgctatcaaaatgactacggctcattattatacaccgtcaggctttgatttgcacggtaagggaattgaaccggatgtggaagtggaactgaaggaagaactgaggaatcagattacagtagatgtaaaggaagataaccagattgaagcggcgctgaaagcgctgaatcaataatgagtgcggcccggcgtgaatacgccgggccgcatgtgcatgttaaatcagataacgaaacagctgaaagaggcgggaggtgacggcaaagatcaccttcttcttggaaggtaccggaattaccggaacctcaggatctgtgacgtaggtgccatccttttgaactgccagggaatcgtcttccagcgtgtcgatacacgctttgagctggcggttgaattcttcgccgtcgatgaccagcatggtctcggtatccacataggtgcttctcatatccaggttataggatccaacgatggagaggcggtcgtcgatcaggatcgattttccgtgggaagagtgatctccaaagtattcgcgaagggaaacgcctgtgtccaggattttccccctgttcctcgtataatcggaggaggccataaaattatcgcctacagatgtggcatttaaaagcatggtaacctccggaacatgatctgcggcttccttcatgccctcatacatatctttgctgaaaacggcgtatggcgtatgaatataagcctgcttttctgcatgtgccatcaggtactggacctgataccagacccagggctctttggcgaggatatgggtagggttggagatcagggtggccttgttgatcgctacggtttccggaatgtagtcatggccggaccgtgtgagctccggcatggcttctttcagggagtggtaatattccgccagttccgtctttgcagcgggcagcttcttcttcatggaggcggagggggaatcaaatacggttttacagtatttagactgccacatcgcctcgaaatacgcgtctgcttctgacagaacactggagggccatgcctcctcctgtccgtgcttcgtattataaataagtacgtcgcggtcatagcttaagttgcgtaagttatactcgcccagaaagtagtcgaaggtattgcggccgcccagcagcaggagcttatcgtctactagcagatatttgtcatgcatgcgcccgttgatggtccagggcttcagcggattgggaatattgtagaattttatctctatgtttggattggttcccgccgcatagaagattggattgccctccatatgaagggtaccgtatagtccgtccaccagaatctggacttttaccccgcggtccgcagcctccagcagggaagagaagatatcccggcagctggaaccatcccggatgtcaaaggtagagagtacgatgcggttctcagcctgatgaatcatctgaacgcggctctccagggcatccatactggtttctacgacacgtgcacggtctacactcttggtctctgaatagaaagaggccggtttaaagttgtttttaaatgcttctcccgttttctttgtatgtacgaagggaagcagtgcgcctgccgccagataaatcagatagagcagcagaacccattttaagatgacgaaaatacgccgtttcatatcatatcaatccttagataccgttatttaattctgcagtttaatcctgcagcttagccttgcaggtttgaagggcggcgacgaaggcgcggcaggcgtcttctttcgtggcccaggaggttacgagacggatcgcactggatccgttggtaccgcgctcctgaatcgaaaagagaaagtcattgcttaaagtgtcaatgaccgcgtccggaagaatcgggaacagctggttggtcatggagtctgaaaggaaggagtagccgcactcctcgatcccttttcttaagatggctgccatctcgttggaatgtgccgccatatcgtagaataaatggttctgaaacagctcttcaaactggattcccagaagccatccctttgccatcatggcgccgcgctgcttgatcataaagcggtaatccggttttaattcatctctgcagatgatgagtgcctctccgaacagggcgccggccttcgtgccgccgatgtaaaagacatccactaactccgcgatatcacgaagggttacatcgttgaccggacttgtgagcgcggctcccatgcgggctccatccaggaaaaggaagaggtctttctgacggcaaatatgatgcagggcctctaaatcggccttggaatactgggtaccgatctccgtggaattggagatatagaccattttaggctgaaccatgtgctcatcagtatgagcctccagagcctttaaaatatccgcaggcgtcagctttccgtctttggatggcatggccagaactttgtggccggtggcctctatggctcctgtttcgtggacattgatatgccccttatctgtagcgataacagcctgccatggacgaagcgcagccgcgatggtaattaaatttgtctgggttccgccggtgataaaatggacatccacgtcgcttcgtccaatctcttcttttattaaccggcgtgcattttcacagtgggtatcgaggccgtatccgccgttctgcactaaattgcagttcatcatggcttctaaaatcttcggatgagcgccttcgctgtagtcattgttaaaactgtacataaacagtcctccctgtatctgatagtctgagactaatcatataccaaatgaggcggaattgcaaggtgggagaagaaaagtgaaaagggatggcggaggcgggatatttaccgggaggtacaggtggtgttataattttttcaggatgtaagaaggaaggatgccggaaaagaaggcatgataccaggaggaagaagaatggacaaacagatgatcagcagtgcgggaatgctttttttatatttggccggtgaagtgagtgaagacggcgcaatcggtattcattggacagacagctatcaaagaccgctggatttttatgagagagtaagggaactgagggctgaaatttccgataaagtggatttggagattttctgcgttctgggagtgtctgaaaaggtggatgggatagaagccttcgttgaagggcaaatcaaagagcgagttttagaaatttgcggggaacccgggagagaagggaaagggatccggacggatcggctggaggcggattttaacagactgatacaggaatatatttttcaggaaaggaacatgctgtttcccagaagctgccgcatggatatggagggcttcgagatgtattgtctctggggagggacagatcaggaggatgacagacacctgtggattgaagagacggtggccgtgtggaggaatgttgagaaaccgtttttatttggaaaacagataatggtacagacctttgaattgagtgatctggaaggaagaaagattatcggagcgcttcatgattcggaggaggaagggtggaatctgctcatcgaaggcggaatgaagctttatctgcataaagaaataccatatctcagagagcggattggagtatcggacgctggcctgtttaccgtgtctgagatagaccgcattaccagcaacccggtgtatgcgtatggcaaagcctttcaggcccgggaactgtgtgaagagtggcataaagtatttttctttacagcggcgctgacggagcaggtgtgggatgaagatgcctttgttcctgtttatgaaaggttccttgcatttctggaggaaaatatcagtgatatctgggaggcggaaacgattattgaaaagaagatgttttggagtgtcctgaccgggcacatcgatgagatcaggggatatttgaagggggaggaggaagtggcggtatcgaaagattttctcctgcttttaaacagcagatatgcgtatctgccctatttgcatgaactgataaagccggcgggagacagggcagtgaaaaagacagcagattgtgagaaccatgcattttctccagaaaaaatgagacagatcattgaactgtcgggaacgggggattcttttcaaaagggagtgcagtgggaagcggcagcagagtattttatcagccatacgaaaggcctgaaggtcagcggacgccgtatacatgtgggtctccaggagattgatttgagtgttgtaaacacgtctctggacagtaatttatgggaaatgggagcgtattttctgacggaatgcaaaaactggacggataaggtgggaataccggtaattcgggcactatcctacagttccaatatgaagggaaacaaaacgacgctgttgtttgcggcaaatggggtaacgagagacgggaagagagagattctgagagcggcggtgaatcggcagtttatcctgtgctttacgaaacaggaattgctggaagtgaaaaacggggaggaatgttatgaacttctggttggaaaatggagggagctaaaggagagggtggaacgggagataatggtgtaggaggaaaacgatggctgagtttatgaggaaaaagtggaaaaaacaagaagaacaaatgttcgtgatatgcctatactttttgcaggggatgtggtataattttatcggattaccaggtagccaattgaaggaatatgatgcggcttgattcggaaactttacatggatatcgggaccggcacatggcatatcgtgccggacatctctggaaaaatttaagcgatgagcagtatcttgaaaggattggggcagctgcttactcagagaaagatggccaagctgcatccgacagcggccggcctgttgatgttgggagcggaatatcatatagctcgcgaattcccggagtagtttttggactatagagaagttttagatccaacaataagatggacagaccgactgcattccagttcaggagactggacaggaaatttgtttgatttttattttagagtttacaataaactgattaaagatataaaaatacctttcaaattggagggtgggaatcgtattgatgatacgccggtgcataaagtactgagggaggcgcttgctaactgtctggtaaatgcagatttttatgtgggacgtgggattgttgttaggaaaaatcaagaatctattgtaattgaaaatcctgggtatgtaaggattgaaaaacgacagatgttaaaaggtgtaatttctgatccacgaaataagacattgatgaagatgtttaatatgattggaatcggtgagcgtgcgggaagcggtgttccatacattttttctgtttaagaacaggaagggtggaaagagcctgagatagaggagcagtatggaccggatcgaacagttctgatattattgctgactaaaaaaacggcgataaaaaacggtgataagaagtctgtatctaaaaaacagacagacaattagagaaaatcgtgcttatgatggaaccgggtaaagaatataaaactaccgaaattgcaggatgggttgatttaaaatcatccagaatgcgtgaactgttgaaagtgctttcggagaatggagaagtagaggcaataggaaataatcgggagaggacctataaaaggatgcagttagcgcaaagcagtaaggatagtcgctgcgtgtagcgcccattagggagtcaaagtaaaaaatactttttattgggacaccaaggaggtaaaaacacattatggagttcaaattacacagtgaatatcagcccaccggcgatcagccgcaggccattgaagctcttgtaaaaggcttcaaggaaggcagccaatttgagactttactgggcgtcacgggcttcggcaagaccttcaccatggccaacgcaatccagcaattacagaagtcaaccctcatcattgcccgcaacaaaaccctggcctcctagctctattccgagtttaaggagttcttcccggagaacgcggtggagtattttgttagctactaagagattacactttggaacctgttagttagaggtgtttggagttatttatttcagattttgtggacggtatggacgtaatagcactatatggatttaatagcattggtgcccctcattcgtaataatgatatatattacaaccttaattttaaaagatgaaaatgttttaaatattaaactactttgattttctcgtgatttaatgtgtgataataagtaaaagaggaggttctaatggaggataaaacaattcaaatccgtaatagtacagtcgattttttggtatttacaaaagatgccggagaggaaggaattgaagtaagggtgcaggcaggaaatgtatggctgacccaaaaggcgattgctcaactttttgatgtagaacgtagtgtcgtgacaaaacatataaaaaatatttatggttcaggtgaattagaagaaagtttaacttgtgcaaattttgcacaagttgcagacaatggaaaaacatatcaatataaattttattctttaccagcaattattgctgtgggttaccgggcaaatggtcaaagggcgctgcaatttaggcaatgggcgacaaaagtattggatacgtttacaaaacaaggttatgtattagataagaatcgtttgattaatggtcaaatttttgatgaggattattttgaccatcttatttcggaaattcaggaaatcagggcaagcgagcgtagattttatcagaaaataacagatatatacgcaacagcagtagattactcgttagatagccaaacaacaaaagacttttttgcaactgtacaaaataaaatgcattatgctgtgcatggaaacactgcagctgaagtgattatgaaacgggcagatcatatgaaggaacacatggggcttatgacatggagaaatgcacctcaaggaaaaattgtaaaagcagatgtatctattgcgaagaattatcttttgaaggatgaaatgcaggaactaaatgaaattgtaacaatgtatcttgactatgctgctcgtcaggccagaagacatattccgatgacaatggcggattgggcttctaagttggatgcatttttacagttcaatgatgcagaattattacaggataagggtaaagttacagctgcaatcgcaaaagcttttgcagaaagtgaatttgagaaatatcgaattttgcaggataaagagtatatgagtgattttgatagattattgttagagaagagtgagaatagttagagatgtaaataatgggatgtgataatggttttttggccatgcgataatgtgaattaagaaaataaaattactggaaaattaaatattaatgcattgaaaattaaactatttaacaggcaggaggaaattgatctgcttccaaatttggatgtgggggaatgtattgttgttgaagatgctataaagttacctactaaaattttattagacgaaccaaaggaaacaccgaaaagttctactatagattttggggatagatggaatgatcaagagaatactatttatgacttggacagtgcgatattgaatttggtaagacagtcaagaagttagaatatttaggcccatagtagagcataacttgttgaacttagactatatttaggaaaggcaattaattggaaaataagatgagtaaaactgaactatatttaacttccacaaaagaagaacagcaattttatgatgatgttcgacatattttataaacagcgaggaattcagcgtataaaagcgtcaactccattatgtctaaagcctactgggagataggcgaaagaattgtgcaacaggagcagaatggaactggaagagcaaagtacggtgattacattattcgcaacttgtcaaaagaactttcaggagagtttggaacgggattttctattgcaaatttaaaaaattgtcgtcagttctatcgtacttttcctaaagattcaattggctacacggtgtgtagccaattatcgtggtctcatttaagaaatattatgcggcttgattcggaagaagaacgtaattactatattcaggaggcaattagaggaagttggtcagtaaaaatattggaacgtaatataaaaagtggatattacaaaagaatactatctacacaactgcaagatccattagcagaaaactatgaatttgtaaaagacccttatgtacttgaattcatgggattgccagaaaattatgagtataaagaaaatgagcttgaaagagcgattcttctggataatgtaaatcaggcaaaagagtaagaagttcattataaaatcttatatgatcctattttgtattgctaagcagtaaatgatattgttttatcagtaactaaattctgaaattcgaaagtacgcctattaggcagcaactcgaatgcctgatttcaaatatttcacgaatttctgtctaatagacgtactttttattgggtcaccaaggaggtaaaaacacattatggagttcaaattacacagtgaatatcagcccaccggcgaccagccgcaggctatcgaagctcttgtaaaaggcttcaaagaaggcagccaattcgagactttactaggcgtcacgggctccggcaagacctttaccatggccaacgtaatccagcaattacaaaagccaaccctcatcatcgcccacaacaaaactctcgccgcccagctctattccgagtttaaggagttcttcccggagaacgcggtggagtattttgtctcctactacgaaaaacaaaacaaaccactactgattgattatgattggtgataaatatactatatattgtgtgctgcgtggagcgtatggacgagataatgccatatgggcagtatggattggtgaccttcattcgtaaaggagcggttcgaagttactcaatacgtagtggagaagtaagttgaatataccagaaattaagtattatcataacagaataaattgttgatttgaaaaagatgtttccacatgtggagatgtctttttattttattcaaagaaaaggagatgcacatacgatgcggatataaagataggttgtattaagtagtgacataataaagaaatattttgaaatgcccttgaatggatgaagactcatattttagagttattatagcagatattctatttcagaaagcgagcagagaatttgatacttatgttttattttattaaaagaaaggagatataccgatgagagagggtatggctaatgtgatttttaagagtgcggcccatagggacttttttgaaagatatttgtctcaatgcaggtaccaagatgcctaccatgccgcattaatctattgtctgggaatcagcgaggatacaagacgtaatgcagccaggatttatgattttaaatctggttgcgttaaaacagaatgcctgcatgaggggtggcagacttctggcagccagcacattataagaatggcatataatctctactgcaacggtactcccagcgtatctgattgtgagaactcagacgatcagttatctgaatgcagaaaatatacggtcgaagatttattttgttgtggctatgcaccgtatttttggcaggcagtgaaactcagatatccggagtattgtggctgtgcatgatgtgttgcagattctatagagaacaaaaggagaatatcatgaacaaaataatagccatagcaaatcaaaaaggtggagtcggcaaaacgactacatgcgtaaatttaggcattggattggtgagaaaggggaaaaaggttcttttaatcgatgcagatgcacagggaaatttggcagcctgtttaggaattgatgagccggacaacctggaggtaacactggtaaatattttggcgaaggtggtgaatgatgaacctctggatgtgacagagggaattcttcaccacgaggagggtgtggattttcttcctgcaaatatagaacttgcaggacttgaaacaacgctggtgaacgttatgagcagggagacggtccttcgtcagtatgtagacgagataaaggaccgatatgattacatattgattgactgcatgccatctttaggaatgatgacaattaattctcttgttgcggccggcagtgttctgataccggtagaagcggcctatctgcctacaaaggggttacagcagcttataaaaacgattggccgagtccaccggcagctgaatccggaacttggaattgaaggaatattgctgacaaaggtagaccgacggaccaactttgcaagagatatttcagacaagctgagaatggcatatggcggtcaaattcatatctttgaaaactgtattccattgtcggtaagagcagtagagacaagtgcggaagggaaaagtatttttttgcatgatccaaaggggattgttgctgatggatatgcagctctgacggaggaggtgcttgcttatgggaagccgcagtgcgaataaggtgaaattcacctcttataatgacttgtttggtaacgaatcaatagaacaaagcgctgaaggccaggttatacatctatctcttgatatccttcattccttcaaaaatcatccgtttcgcgtccttgatgatgaaaagatgatggaaaccgttgatagtgtgagaaaatacggggttctgattcctggagttgtccgaaaagataagcagggaggatatgaaatagttgcaggccatagaagaaagcgggcctgtgaactggctggatatcaggatatgcctgttatagtccgggacttgaatgatgatgaagccactatcattatggttgattccaatattcagagagaagatctcctgccatcagaaaaagcaaaggcttatcggatgaaaatggaggcattaagccatcagggagtcaaaggagaagagtataccgctgatttaataggtaaaggcgcgaagaaaacaggaagaacagtgcaacggtatgtgcgcttgacttatttgttgccagaacttttagaatatgtggacttgaaaaaactcttgctgatacccgcagaaaagttatcatttattactgctgaagaacaggggtgggtactgggagtaattttagataaacgtctttttcctaatgagatacaggcagaggccttaaaggatgaaagcaaagcagggactttaaataaaaaaagagtgacagaaatattgatttcggactctaagatgcccagtatgccgaagattacattatcccctaagaaactaagggattattttccgaaggaatatacaaaagggcagattgaagctgtaatatatgacttactggagtcttggagggatagtcacaaagtcggttaatctaatacatggagactttgcgaaagaatgtcataaagtcacttatctgcactttgcgaaagaatgtcgcaaagtggccagccattagaattattctccaaagcaaatatatttaccaaaatgtagaagatataaaggaggataaatataatgggtaaaagtggagttataacgattgaaagtaaagataatcaggtatatcatgatgttgctgtattatttaaaatttatcgttctgtttcctggcgaatgcaagtgcagattggacaagtgaaacatcggtttcaaaaagagtatgggacggatgtggatcaatttttagagtcaatatatcaggctggcatggatataaatgatgatgaagcaaatattaaatccagagtggaagcaatcaacagttccaacaaatttttaaaattgattgatgaggctgtagagcttatgagaaaataccatccgcagggagaacgatattattggattctatattatacttatatgtctgcctatcagccaaacaatataacagagattataaataagttggaaccgcatttgtctcagaatgtgcgtataaatcgaagtacctactttcggtggagagaaagtgctctaaaagccgtggaaggtattctgtggggttacgagatggaaagccgaatgctattagaacattatcgtgatacatgggtaatagacgtgtaatatcctttttaatatgtttataggagaggtgagttaagttgtttgagaatagggacacatgtagaaagattatacaagaaaaaagtttattatcaatatttgatatgattgcgcaggaagaagagatgatgctcagagagagagctagagggacgattaatttgcaaaacaatgttacaaagcagttatcaagtggggaggttttagataaaaaataaaagcgcaccatatattgtgattaaatattgacacatacaatatgtagtgataaaatgatggtgtattgatttatgtagtacttgaataagtaacacataaaagtttgttctttctgcattgaaggaagcaatcagagcatcagtttgttctgggtgttttaaatttattaagctatagaatggcgctcatttttagaaaaatgtagcgtctttttttgtgcagaaaaaagcaacaatacagaaggaggatagcgattaggaatcagagcttaattcaaaggaggaatcaaatgaaacgtgacaaatttaagaaaatgaaacttgatatccagacacttgaaccagtgagccatccagataactgtgttttactgctaagcgaagttaagatggaaaatccagaaccaatggaattgtcaatcggtcaggcaatgcagaaaaaaagctggatgcctgacggaacaatattagttggactggaggccaaaggtatcaggacagaagatgagaaactgaggaatttaggcaccagcaagcaggcggagattctggattataatttttttcgttccaggttgccaaaaacagtgattacggaagtgaaagcagaactattagacttccgcttaagaaagactatccccttttcagttaaaaagctggaatttgcttttggtaacggaaaaaaggtggattatactgacaaggtgagtgtattatcgttggatcagttagccagttgagaaggaggctgctatgatgaagaataatttgcaggcaaaaagaatcgtgataaccgcaggagaagtacagttaccaattaaagtgggtgaagaagtatgctatcgatatgatggtcatctaatgtggacggatagggtacatcgcattctggaggttgcggcggattatgtacggattgagactacctcctactactatacaatcgaaagaaatggcagagagtgtgggcagttaaaaggtgcggcttaagcaagatcaaaaaagagataagaaagggacaatattgggaccgaacatgcattgacttgagatttcaaagtttttataatgatatcatcagtttttatgcatgggaatatttccgtggagagccataaaaattgtaaaatatgcagagaaggcaatcatcattgtgatggttgctttttttgtaccaaaaaaggagtgattaatttgagcaaggacagacaggcggggtttctggtgtttaatcaaaaaaagcatataaacataccggcgcttacaggacagttttatgtagtcagcatgatagtgctttttaggtgtcagactgcctatgcagatatttttgatacagctaaatccgccatgcagcaagtgtatacagatgttgctggaattgcaacggtaggtgcagttgtgtgtgcggcagtatgtctctttcttatgaatttttcaaagtcaggaaaaaccgtggatgaatcacgtgcctggctaaagcgtattattatctgttgggccgccctaatgactcttggcggtattgtaacctatatggaaagtattattccaaagagtatgttttctgcgtaactatatggagtgtataaaaaaggctggtgctctcccagcaaggaggtgtgtaaaatcctgtaacgggataataaaatgggctggctgttagaattattatttgaaagtattaaagaaatgtgttcccaatttatcatagatatgatggatgtcgcaagcagtatgtttacggaaattttatcctgtaatttaaatctgtttgaagaattgtttggcgttgccggtaatttgtaccgggatggcattatgccgattgcggttatgattcttcttatgattttggtctggcagttatttaagggaatattcagcaagataacaacctcatcggaggatccaattgaactcatacttcggtcggccatcagccttttcatgattgtctacgcaaaagatattgtcaattatattctgaatattgtaggaactccttaccagtgggtagcgggaagcgcaatcacagtttattctttttcagcatacgtgacagcagcggaggcagtggtatctgtattgggcatcgatataatcagcattcagatgcttttgttaatcatgcattttgttgtagcttggaactattttaaaatgctttttattttggcggaacggtatgtccttctgggaatcttttcttataccgcaccattggcatttgcagccggcggttcaaaatccacaaataatattactaccacatgggtgaggatgtttggtggacagatagtgattatcatactggacgcgtggtgtctgaagatgttcctttcgggctatggtaacttaatgtccagcagttatggatttacgaagtattttgcggcaaccatgtgtctgattgggttttgtaagataaccgcgaagcttgatagttatatggcttctctgggagtgaatctgggcagaatcggaggcggccttagtggtatgggcgcgcttcttatggcaggccggctgcttcatatgggaggcagcggtggcagaacaggaggtggaaaccaggaaaagggagcctccctcatgggattcggcacaggaaaaccaattccaatgggaagcggttctccgaactttggggtggctggtatatccggtatgcggaatggctccaatattggcggtatgaatggtggagtgaatgccgaggaaaaaccagaaccaggggaggactttggctggcatggggctgaaaatgaatttgacagtggaatgcctggtactgagagtgcaaatgccccctttggaatgccggatgaatccgattttgatgcacaagaaggttcctttgacgggatggagagtagggaaggtatggattaccctggctttaattatgatgaggatatacctatggatagctcttatgatgaggcaggggaaattcccggaatgggatatggaaaagatgggccgtttggagcctcccttgatgagcctgaagaagcgtttggaactgaaatcggaatggacgaaggcaatatttctggctttgtaggagcagaaccgggtggcggtatggaggtatcaggagagactggtggaattaccggaatgcaggatggcgggcaggaagcagaaccaggtgcaggaatggcagacactggtattctttcatatgatagtgaatccgcacaggcaaaagaacatgcaggaacattgcctggtggagcagaagccatggctgcagattatgcaggtggtttggatagcccggcctcttctgtacaatctggtctgccgggaaccagtacggcaggagccggcatatctgatactgataccgcaataaacgaaatggcaggtggtggcgccatggacgaaggtcagccccatagcatgggaatgggtggcagtgtttccaatggtgctggtgctgtctcaggcgctgaaagtatgcaagaggtcaaaggtgtatcccagggcggaatgcagagcggtacagttatggaaactggtaccggaacttatggtcaatccggaaagggcagttctgataaaaattatggttcttatcttgcggagcgtgatggagaacggtatatgcgttatgatgccagtcggtttgaaaaaccacagggagcctatcagacgatacatgaagatggaaaaacctattacgaacttccggaaaaggaacaagctccagcggttttaccggaaacaaaagcggttttggaaaagaacggcatgatacgtctggagaaagtatacaaggaaacttctcaagagagaggcgtaccgaagcaaacgccgaaaaagaaaccggagaacaaaaagaataccggaaagaggtatgcggacggaaaaggggaaaaaagataacaaacagccggtctaaatgggaccggctgttttataggagagagaatgaacgaagaccggagcaatgagccgcttgacaaagcggcagaaacggctgcccgaatcgttcgggcagcggggcagacagaaaaaattgcccattcgatacaggcggtacatgccgccactggggctgtcagggctggaggtgcggccagcggtgccacggtgggaaccgcgttggggggaccgcttggaacattagtcggcgctttgcttacaagtaaaaccgtttggaaagtaatcggttctatcctgcttgcaatcctgctttttgtatatctgcttgtaaattctgtcagccttatttttatgtatctcggctttgcagatgcggatgcatatgtgtcccaggctcgcaccgcagaatgcaataacataaaaatacagatagaggctctttttgccgctgatccggcttttgagtcagaaatatatggtttggtcgaggccctaagagataaagcagtagaggaaatccgggctgactatgataataaccagagtggatatgatggatatgaggtggacgatgaatatgaaacagtcctaaaacccagattgagccagtatctggctgtcctgatggaagaatcctggagcgggaaacagatagaaggatttaatgggtacggtacagggggagggacaagcagtcttaccagtgcgtacgatgaatattttacgcttgcgtccgccacttatcaggtgtcggaagtgttgttaaaggctatggcaaaagcagaatccgattttaatccaaattgtgtatccagtgcaggtgctatcggaatcatgcagcttatgcctgaaacggcagcgaacctgggcgttactaatccctacgatcctaagcagaatattatgggaggagctaactatatctcacagcagctcgcagctttttctgtttatccgaatgggctggaattggcgattgctgcatataacgcggggccaggcgctgtgaagagagcagggtatcaaattccccaaaatggagaaacaccagcctatgtgcaaaaggttctgggatatatgggagaggggggaggaaacacgataccgggaatcacacagaccgattcgtccatatcgaaagtgctcttaaaatcctttattgatgaaaaagagagcgccttttttgattgggcaaagacaggaacacatacagaaaccattggttccggcgatgaggaagaagaaattgaaattgtggactattctattgtggtaaagttgaatccacatttgtcttcaacaggaaccggatatagtttccgttatgtgacggacccaaatagctttaataacgtgctgaagctgttccagttagttcaaaatgggaaggacggggcactggatatactatttaaggccgcaagctggaaaaattatatattaggtgcgggagcgtctggcggtatttataccagtaccattgctactggaggagataaaatcatctatgagacagtgcccggatgtgtgagggaaatagtgtattacaaccagggggaggaaccctgggcctctctttcctatgggggaagcacaatacgtacttctggctgcggtcccacagcgcttgctattgtgatttcgacactgacaggtgaacagataacgcctgagctgacagcgcaatatgcgatggacaccggaggatatgtttcgggacgtggaaccagccatgcatatccggcaaatgcagcccggaactggggactgtcggttgaacgtgtgagacgcgaacagatgaattatgtggttgcggaattgaagaatggaaagcttgcggtggtaatctgcgcggagaatacgatatcaggaaacagcggacactttatcgtattaaccggagtgaccagtgacggaaaaataacaattgccgaccctggaagccgggggaggaccggaaacctgtacagcccttccacaattcggtcatacgccagggatttaagcgatggcggcatatggattataggagagtgaaggaatgaagcatagatcaaaatggagtttcgttcccagccttgcactcagcctggttcttggcatttctggagtttgctatgccgatggtctggcgggtgcaaaaggagaaacaatgtgggatgaagagtataccgatacagatacagggaaggggacgctggctgtccggtgccaggtgtttcaagggtttcagggagcagtcaccatttattttaccggactgacaggaggaagggcatttactgtgtcacttgataaagatgttggttatatagcgaacttgtcgctagcgggagagcggtacaaagtaactggagtcacggccatatcagaactacgggaatatgactgccatgtagagccagatactgtttgcgtggaggctggcaggatttctatctgcaaggtgtttgtgaatccaggtagtatccagaaatttccagaaaaaacagaaacgctgatgacagagcaagctgaaaaacaagaaataatagagaggaaaaaacaggaagaacagataaaaccagccgtggaggaagagatgcttaaaacagagtcggatcggaggcagataccagttttgggtattcttggcatggcattaatcctaatctgtgccggcagcctgttttatttaagaaaacaggataaataggaggggaacgggtaatgaatgagaataaccggattgatatttatacaatcccgcccaattttgctgaggaggggacaattctttccgggcgggtaaaaactagaaatgcatttgaaacggcactgattctcgcgggattggtgccgcttattatgtcactgagtgttacgggaaagacaaaactatacatcggcatgatagtcctggtgccggttataatcctggctatcctgggagttcagggagaaagtctatttgcatttatcgcaagctttttcaaatttttaaagcgccgccgtagcctgtctgtgccggatgagagataccgcttagaacagagcaggaaaaaagaaaggtcagagagaggagggaagataaagcgtgaaagagggaaaaagcacagaaaaccaaagaaaagcctggaggcgggaactccggagagtcagaaagaaactgatacaggagcaaaaaagaagaaaaccaaagcaaaatggagaaaatgctccccaaaaacagaagagggagaaagtcacagcagcgaagcaggaggagttctatgacctgccttatacaagagcctctaaagaaattccaattgaatcaatccgtgacggagtcatttacacatcggatggccgttatgtaaaaatcgttgaggttttgccaattaacttcctgcaccggagcgccagcgaacagcgtaacatcatttattcttacataggctatttaaagatagctcccccggaactacagataaaatccatctcaaaaaaggcagatatcggcctctatgttgaggcggtgaagcaggacattgaggcagagccagatggacggtgccggatgcttcaaaaagattatattaagcttctgcgttcggtcggctaccgggaagcggtaacccggaggttttttctggtgttttctgtggacagcaggcggggaacagagtctgaaatcgcagcaacattaaactcttacgcacagacagcaaagaaatatttatatcagtgtggtaatgaagttgtaatatcagataatccgacacaagatacggtggaaatgctgtacctgttgttaaacaggaaaaccagcaccacagtctctctttcccagcggttaaatcaggtggccgcgtggtatatccgcgagaatggggaggaaagtaccggccggattccggttgcggaatactttgcgcccgaaagtctggatttcaggcatgggaattatgtaatcatggacggagtataccatacatatctctttgtcccatcggccaggtaccggaatcgggtgccggccggctggctgtcccttcttgtcaacgcgggagaggggattgacgtggacctttttttatataaacaggataaggttaagaccattgagcgcattggaaggagaatacggctgaaccgctcaaaaatcaaggatgcctccgataccaatactgattttgatgatctcgcagagtcaatccaatccggatattatctgaaaaatggactcgcggcaaatgaggaattttattatattgctatcctgataaccgtaactggatacagcgcaaaggaagtggagtggagggctaaggaaatgaggaagctcttaaatgcccaggatctggatacagtttcctgcctgtttcaggaggagcaggcattcttgtccgccctgccactgttgaagcttgagaaaagcatttatgagcgctctaagcggaatgttttaacgtctggagctgcgagctgctatccctttacctcgtttgagatgtctgacaaggacggcatattgatgggggtgaatactgcaaacagttcattggtaattgtggatatttttaattcatccttatataaaaatgcgaatatttctatcatgggaacaaccggagcggggaaaactttcctgctccagttaatggccttgcggatgagaagaaaaaacatacaggtttttattatagcgccggacaagggacatgaatttgccagagcatgtaccaatatcggaggcgaatttattaagatatcgtcatcttcaaaaagctgtatcaatgtaatggaaatcaggaaaaaaaataaggaaacaaatgcaatcctggacggggcggtcatggaatattctgaactggcggcgaaaatccaggacttacatattttcttttctcttctgattcccgatatgtctcatgaggaaaaacagctcctggatgaagctttggtactgacttatcagcaaaaggggattacccatgagaatgaaagcctgattgaccctgaaaacccggaacaatataaagaaatgccggttttgggggatgtttacaatgaactaattaggaggcaagaaaccaagagactggcaaatattctgaaccgtctggtgcatggctccgcctccagtttcaaccagcagaccaatgtggatttgaagaacaaatatattgtattagatatatcagagcttaccggggacttgttgccagtgggaatgttcgtggcggtggactatgtatggtctaaggtaaaggaggaccggacagaaaaaaagatggtatttctggatgaggtctggcagctgattggtgcttcctccaatgaactggcggcggaatatgttctagagatttttaagataatcagaggttacgcaggcggagcagtgtgtgcgacacaggatttgtcggattttatggcgcttaaggagggaaaatatggtcgtggcattatcaacgctacaaaaactaaaatagtcctgaatctggaaaatgacgaagcaaaaaaagtacaagaactacttcatttgtctgacgcggagcggatggaaattgttcattttgagcgagggaaggggatgatttctacgaacagtaataatcttacattggaatttcgggcaagccagcttgaaaatgatttgattaccacggatcggaaagatttgcagaacctaaaggaacggcttgaaaaattcggtaaccatgcatatggaaggatgggaggataactggatggcggtatatgttagccctgaggccatggaggagaggacattaatggtaatacgcaagtataatgttctttatatgaaacagcttttgcatttttttgagggggaagaaaaggctgcgggaaaagcagtgtcgaggcttttaaagaacaggcagatttacagaaatcctcataccggtcttcttgcctccaatgaatttgcgtattcgctgaaggacgagggaacaatacaaagtctttgggtattaatcgatatgatgcataaacgggaagtggacggccattatctggcggtaaaagaggattttccagtaagaatcttgtttttctgtgggcaggatatctacgatattatttatattggaattggtgatttaaagctggttaatggtatgtttgctaaaagcaggcgctcagaggaaaatcacattattgttttggaggataaagtgatgattagccagatagaggtacctggaatcattggtttttgtgttgtgaaagagggtggagaggtcgaatattatagaaaaaggacatgaatttgagattatggagctattggaacatcagcttttggaggttcagagagttgcaggagtggtacaggataaactggctgaggcacagagtgtaaaaacactttatgatcgtagcgcttccagttttcagtatggacgattgttagattgtatgatggaagcttctgaacatgctgaatgtctgacagaccggctgcggggatttgtattaagaaatacatttaacagtcctctcaaagaggattattgtctgaaactagtacaaatccatgaaattcgtgtggaatatgaggattgcatattgaaagcagaacttccaatgttactgccccaccgtaaaaaaaaatatacagactatatctataaacctttttttctggcactgcagaattggtgtgaagagcgtcagcagcaggggaaggaaattcctgtatacgagaaggcaacggtctgttttattcatgagtatgataaaaaaatgccggaaaccaggattcgggaccatgacaatatagaggaaaagcaggtcgtggatgctttgggtatgtacttccttgtatcagacagcggtctgtatctggacacttatcatactaccacattgggggaacgggattgcacgttcctttttttgatggaacgtaaccggtttcctaagtggatttgtaaaagaaaccacctggacatcatatcgaaaaatcatctgaatcccgccacaggtttttcgacagggtaagattatggtgagagccattaaaaacgtacctaaagacaaaaaaagggagagtcattctacctagggatggagaggacagggtatgaaaaggaacaaaacggaataagaagaaggggacagatatgaaaatagatagaaaagatgaacttctgttacttatagcagtcagcggagaaataccgtcagattgggttggccgtgcagtcggttccgaatcttatgccgctgcgcttttgacccgattgaagcgggagggagaagttaaacttcggagtaaagacggtgtcagaggttatctgctccgaaataaagctaaacagtatctactggttcattatggggatgatgtgcggctctatttgtccggagccaactccaccaatcatgtgaagagtgaaccagagaagcgattgaggcttcatcgcatgagcatggtatggatttactttcatcatgctgggatacggatttttcagagtgaaaaaacggaactgttccctgttttccatcaagctccgttcagcacacctgatatcaaaggcagtgctccggtatcttattatgggacaatggaatggaaacaggcaaccgatatggaaatcaaggggtctagggcctgcggagtactggccgcagaacgattttacgtagtatacaatatgttggacagtctgatgaaatgggttccaaagacagagcggaatgtaaggagccggctggaggtgcgtctgcgcaaaaacaggggatgcataacaatcagtgctattatgatgggaaccgatatggcaatagtaaggcgtatcttaaccagcatgggtggcttgaaggggaacctgttttctttagatgatgtatatgaatgttattactatattccttttctagaagaggcagtaatccagctaaggttattatgcagtgaagccggtcaagtaaggctataccagtttttatgcagggcgctaaaacaggtgaatgataattgctttacaccggaggctggtgcggatgagaatgggaatctggtatatttttgttatatgatggatttatggcaggtaaaacggattatgagtctgccgttaagaagaggcggcagggtattctgctttacgtatcaggcaggtgtcctgcgctccatattgcctgagtgttttaaggttgaggccattcgtcctgagaaggtgtatcgatatctgggctggaaggaatagggaaggagagagcgctatggaaccaatctatcaaacagggaatccgacagttgaccggttgagccgaattaggcttaccggcaacgtgattcctccggcttggtaccataccattctgagagaaacgggaaaaccatacttaattgccattgtgattttatctgatattgtatactggtaccgcgcagcggaagtgagagatgaagggagtgggcagcttctgggataccggaagcgctttaaggcggacttattacagcgaagctaccaacaaatggcagatcagtttggaataacaaaacgggatgctactaatgcgattgtagaattagaaaagctgggagtcatccgccgtgttttccgtactttgacaatcaatgggcagtccatacccaatgttctttttatagaacttgacgtagatatacttgaaaggcttacctttcccgaagattatgctgaagaggttgagagcgtaaagcgggtacagaaaaagagtcaaaagaaagcccaaggaacacttactatagggtatccccaatttaagggagacgtgtctccgaaatcagaggaaggtctctccgattggaatggggcgtctatatccaaaaaagcgagatctgtctctgaattgggagagacaaatacagagattacatacaaagattacaacaatgaatatcctatctattcatatctgaaggtgaaggaggaatttaaaaatcagattgaatatgaaattttaagacgggatctaaaggagttagaggaattagaggaattggtggaggtagcagtagaggttctggtctcttcagcagatacaatccgggtaaatcgggaagacaagccggcagaactggtgaaggagcagtacaggcgtttaaatatgttccacatccagtatgtgttgacctgtttgcgggagacagaaacaaaagccaggaatatccgggcagttatggtaacggcgttgtataattctgtcaatacaatagggacgtattacgggaacctggttaagtatcatcaaaaaataaagtataaggaagggacagaatgaatgaagaacaaagaaataggaagaaactcatcgcagggctgttgtgtctgcttatattggcactttatgccggaggggttctgcgccagttcatggtggacgccgggcatataagtttgaatcctatccggtgtctatactttgcggtatcctctatccatgggataaaaacaacggtatttacaatccttttattctttgcttttgccgggatagtagtatttcaaggaagtataagcgataccagtggagaggataaggaacgtaatttcacttactcaaagctgggaacttatgggacagctggatatatggaggacgctgaacggaggcgtgttttaaaggaggataaggatatcaggaaggtggagggcattattttcggtttggagatgatgagtggtaatgttctaagtctgccagtggattccaagctgaaccgcaatattgccgtgtgtggttcccaggggtcgatgaagtccagggcatttgccagaaacatgattcttcagtgtgtcaggcggggagagagtatgtttatcactgatccgaagtctgaactatatgaggatatggttgcatatttaaaggcacagaggtatactgtccgtcaatggaacttaattgaccttgaaaattccgatgcatgggattgcctggcagaaattgatgagggcgggctgattgatatctttgttgacgtagttatccgcaacacgacagacaaattcgatcatttctatgacaatgttgaaatggatttattaaaggcgctctgtctttatgtataccatgagtacaaagataaagatagaacctttgcagagagttataagattttaattaaccaaagtttggaagcgatagatgggatttttgaccggctccctacttctcacccagccaagggtccatacagactctttgccaaagctgaaaaggtgaagggaaatgcagtactaggcctgggaacccggcttcagattatgcagaatgaaaaggtgcagaaaatcaccagccataaggaaattgatttaacgctgcctggacgggaaaagtgtgcatatttctgtattacctctgaccaggattcaacctatgatgttttggctacgctgtttgtgtcttttctctgcattaagctgatacggtatgctgaccgccagaagaaccggaaattgccggtgccagtgcattttattttggacgagtttccaaatatcggtatagtgcctgatttcaaaaaaaagctggcaacggccaggggccgcaatattggtatgagtatcatatatcaaaatataccacaactccaaaaccggtatccggatggacaatgggaggagatattaggaggctgtgacatgtccctatttttaggctgtaatgatatgactacagccatgtatttcagtaatcgttccggtgaagtaaccgtgagcgtgtcctcggttcgaaaaaatttaaatacggtgagaatgagcaattatgtgccggactattcagaaaccagttctgtgggaaagaggatgctgcttttgccagatgagatactgcgctttcctcttgatcaggcacttgtgattattcgtggacagaggatactgcgtgtcaggaagatggattatactatgcatccagatgcaaaaaagcttattcaggaaaaaacggattgccatgtaccggaatggaggcgggaagaggaactgagagctgaacaggatagtaaggtccgccaggaggatatcagggagcaggaatccggatttgaacagggaatctggtctgggaaggatttgaaaaaggaagatgaatcccaagaagttggaaaaagcaaggctaatgaaaaaaacattcaggaggaaccgacagagcggaaactgggaataatagagaaagtggaggatttatttacagatgaatgatagcttgacttttgaaaagaaagagttgaaatttcttttggaacgggagtttttcatacatatagactcatttgaggatgaagattatgcaaaagcccggagggcgatttttgtttatgaaaatgcggacgagttttttgaggctacgggatgggaaagaaacaatccagaacttcggactgaggattatctcaccgagaaccgagtctgtcgttggtggaacggccgttttatttatttttctaggattttgtgggaagataattgggggacggggctggaatgatgaaagggattgttatgaccacactttttattcttactatatttttgaccgttctattggctcataattggcagggattagattctgagcagcaggcgtttgtagagttagcggcttacattgaggataaaaagaagaatgtattggatgagggcacagatagtgaaaacgttaaaaccgtggataataagggaaaaatagaagataaagaggcgaaaattctaccggaatatcatgaactggccttgaaaaatcctgattttgctggatggattgttattgatgatactgcgattaactatccaatcatgcaaactccaaaagaactggaatattatctacaccgggattttaaaggcaaggcctcttatgccggaactccttttgtgggaagggggaacctgcaggagaaaagagatctctttttatatggacataacatgagaaatgggacaatgtttgccgatttgctaaagtaccagaagaagccattttgggaggcccatcaggtcattcaagtggataatctctatgagcatcgggaataccgggtattttcggtattctatgcagaagaaacagaatggagtgaagagggggggctgtttgctgatgctggtttggggagcatgaaaagagaggaattgattgaaatactaattgagagagggatgcatgaaaatcggatatttccagatcatcgtgctccactgttattcctaataacgtgtggttactggaaaaaggacagccgcttggttgttgtggccattcgggagaaatgatagggtagaagcgtgtagttgctgataagtgcgatgtgatacataacttcagccaacttccaaggaaaattgcagtgaaaagtattctaaccagcagaaaatattcggtatgcccagaatggcattgttacaattctgaacagtagcaattcgggccgcagaaaagtacaaataaggggttgttgatatgatttactaatgatattgctgttgcaataaaatatgatagtaacacatcgtctgtctttcccataaagcatagtaaaactgtatatccctgtacaaataaaagacgtcaatcatacagaacgggcttagatgaaggttatatgatggtatatggtaaaatatggataataaaattatggagggcgcaggccctccttttgtataatcgtagtaagtgagaggtcgaggccttatactctccaacaagaagaaaaggttaccacttttcattcagtgtttgtaactagtatttttctggaacccggatattagcaacattatgaaacttatatttttctaccatacgtttcttcataagaaccaaattgtaacggtagcaatctgctataccatccgcaaaggagtcagcattaccttcacgtaattgctcaagtgctagaatgacttgcttgttgagatgtgaaagagtatgtttctttgacggataataagcaaaatggtgtccccattcaagaagatgattggtcttagataatataacatataagggttctaaagtggtatgtttcattatagattccaaaatatctgccaaatgaatagagtcagaagaagtaaatttatctgccaactcgtccagttcttctctagaaaaccttggagctgcaactaatgctgccggacgaataattaataccattagctgtagagcgtgaaggtaacgttgtgctttttctacatatctggaattaagagccagctgatgaagtttcgtatcatccggttttataacaatagtgcctttaccatttaatgtctttacaaaacctctttgttcaagttctgataacgcctttctgaccgtcgatatagatacatcgtactgtttggccagttgcttttcgtatggaagaaacattccaacagaatactctccaagacctatttttagattcagatcatcaataatctttgagtaataataatcctgaccacgcatgggattccacgaaaacttcaaacccgtttgtgcaggacatttgggagtggtctctgacaggtaatttaacgtattttgaatggcatccgtaagtctttgatacatatttgagagctggttgtaccttgtgagtggttcattgacctttaatatatccataatgtcattggttgcagatacagattcctgtaaaaagtgtgtagagaaataggggcacacctctgcaaaaaatgtaagcttattatagagaccaaacgtagaatagagttcgctgaatagggaattacctcctattcttaatatatcatatcctaatttagaaggaggacgccatccaccagcggcatatcctaaacgcaatgctttcatagcctgtttatagtgaggtagtacctccacatcacagccttgcaaagaaaaaaccataagggaaggcagtattaaggcaaaagtctgatatacctgtaaaataccttccttttgttttaaaatctcgaaaacagcatttgatgaatcataagcatctatagttgaaacaacaatcggtgcaaggcgaggctgaatatcaaccaacccttccttcctcaatgcgttaaaaacgcggttaatcgtatatctgctcacatggaattgttcacaatacagccgtgaagatggcaaggcatttccaggaagtattttaccctctaaaatacactgcttaatttcgttatatacaaatgtaaattttgtttcttgtgggttcataatttgcctcctatctatctgaattatatcatgatggaataattttgtcagtaagtaataagaaagcgggagacctatttgcacacctaaccaatacgaatgttgccaaaatgtaaggataacatttataataaaaccgtaaatttattaggaaagagtttcagtattatggaaaaacaaaaaattttaatcgtagacgattcagaaatgaaccgcgctcttttagcagatatcctggaagagcaatatgatgtggtagaggctgagaatggtatagaagcaatttctcttctctcgaggcaaagagccgatttttcccttttgcttctggacattatgatgcctgaaatggatggatttgaagtattagcctacataaacaaataccactggaatgacacttttgctgttattatgatttctgccgatgattcccccgcaaatataaagcgggcttatgacttgggtgcttttgactatatcagccgtccttttgattcgaccattgtaaagaggcggatttccaatacaatgtttttatatgcaaggcagcagcgtcttgagaaaatcatcgcagaacaattccacgagcaggagaaaaataataagctgatgatttcaatcctgtcccatattgtggaatttcggaatggagagagcggcttacatatactgcatgtcaatacgattacaaagtatctgctaaaacagctggtcaggtgtactgatcaatatcctttgtccaaagctgatatttctttaatcagtacggcttcagcgctgcatgatattggaaaaatcgcaatttccgatacaatattgaataaacctggacgtcttacggcagaggagtttgaagtgatgaaaacccattcgatggtcggagccagaatgctgtcggacctgccctttgagcagcaggaggctccgcttgtcaaagtagcttctgagatttgccggtggcaccacgaacggtatgatggaaatggttatccggacgggcttaagggagacgaaattcccatagccgcccaggtggtcgcgctggccgatgtatatgatgccctgaccagtgagcgatgttataagaaagcttattcacataaagaagctttgaacatgattttggaaggacaatgcggtgcatttaatccgactcttttactgtgtctgcaagaaattgcggatacgctggaaaatgagctaactgataattcttctgaacaggagactaaaaatattcaggatataagaaataaaatagactacgacaggttgttttcctatgaaaaatataccttcctgtcccgcaaacagcggcacctgcaattattatatattgattcattaaccagtgtctataaccgtcgttattatgacgagcattttcaaggctcagataatattcaggcgatggtcgtaatagatgtggataactttaagcatatcaatgataattacggccatgacgtaggcgatattgtgctgcagaacattgcacaaactgtcttatcctgtgttcgaaagacagatgccgtgattcgatatggcggcgatgaatttgtaattatcttttttagtattcctgccaatatatttgagaaaaaactggagaggattcggtattcagtcgatagtctgatcattgacggccatcccgaattacatatgacagtaagtataggcggggtatatggaacaggaactgcaaaaggacttttcaaggctgcagacagtatgatgtatcaatcaaaaaacacgaaaaacaaagtgactatatgttatcttgatgagaataaagacatcgcggacaatatctaaaatgggggaaaagtgattatgaacctgaaagattgctatttaaaatttggcggcgattttgatgaggtactgggcagactgcgccgggaacagaccgtccggaaatttgtatttaaattcctggacgataaaagcttcagcttatttgaagcgtctatggtgaaaaaggactattccgaggccctcagagccgttcatacactcaaaggtatttgccaaaatctttcatttaccagattgtttgaaagtagtagtttggtaacaaacgcattaaaagaaaacgattggaataaggctgtcgatatgatgccgaaattatcaaaggattactatgaaaccatcaatgttattaaagattttaagaattccagggaggaataacatcaatgagaaatagtaaaaccaaggattctacaacacgttttctgatatacagttttattggacttttaatctttagtattattattttcagtctgctcggaatctacatgagtcgaaagagcgaaaagaccgtttacgaaattggtcaaatttatatgtctggaatgaataaacaaatgtccaaccactttgaaactgttattaagttgcgttttggtcaggtcagcggcattgtatctgttgtctcagcagataataacaataaagaaaagttatatgaggaacttgtttacagggcacaggtcaggaactttgaccatttagcactttgttctactgagggaaattttcagactctttatggacaatcaatacagccactgaacccggagccctttgtagaagcattagtacgaggagaacaaagagtcgctttaggtagtgatcctgctggaaatctagtggtattgtttggcgttgatgctactgcttaccctatgcagaatggcagtatgagcactggactggtagcagccgtcccactggagtacatcaccgatttcctttccttagaagatgaagggcagctgatgtattatcatattatcaggccggatggtagttttgtaatacaaaatcccaacacggagctgtggaatttctttgaacagctgcaaaaacagtctgattctgcagtgaatgaatcatcagctgaaagtcctgttgaaaaatttaacgctgctcttaaaaaacatgaagaatatgctgcaacattggaagtaaatggtgaagaatgtcaaatctatggtatttcattgccttattccgagtggtatttagtatcggtgatgccgtatagcatattagacgatgccataaataatctgagcagccagcgcatgttcatgacattgttgtcatgtgcttctgttctaattattttgacactgattttcctccggtatttctctataacacgttcacagctgaatgaattggagaaggcccggcagacggctcttgaagcgaacaaagccaaaagtgaatttttagcgaatatgagccatgatatccgtacacctatgaacgcgattgtaggcatgacagcgattgccacagcccacatggatgacaggaaacaagtagagaattgcctcagaaagattacattatcaagcaaacatctcttagggctgatcaatgacgttttagatatgtctaaaattgaaagtggcaaattaacgttgacaaccgaacaaatttcattaaaggaagtcgttgaaggcattgttaacatcatgcagccacaggttaagactaaaaagcagacctttgacatacacgttgaaaatatattaacagaaaatgtgtggtgtgacggcatacgcttaaatcaggttttacttaatctcttatcgaatgcaacgaagtatacaccggagggaggctcaatacagttatccctctctgaagaaaaatctccgaaaggggaaaactatgtacggatttatatcaaagttaaggataatggaattggcatgtcgcccgaattcctgaaaagaatatatgaatcctatagccgtgcggatggagcccggatacataaaacggagggggccggtttgggcatggcgattacaaagtatattgtggatgcaatggaaggaaccatcgatatacaaagtgagccagataaaggtaccgaatttctactcatgtttgattttgaaaaagccgccgcagtggaaatggatatggttcttcccgcctggaatatgctggtggttgatgatgacgaattattatgcgagacagccattgacgcgctgaaatccatcggaataagagcagaatggacattaagcggagaaaaggcaatagaattagtaaatgaacaccacaaaaagagagaagattatcaaattattctgctggattggaaactgccgggtatgaatggaattcaggttgcgaaagaaatccggagtaatctgggagatgaagtgccgattttgttgatttctgcatatgactggagtgaatttgaagcagaggcccgtgaagcaggtatcagtggttttatttccaagccgctttttaaatctacgctgtatcatgctttatgtcagtatatggacgttggaacagagcatgagcatacattgaatcaaaatattgatctatccggacgccgcatcctgcttgccgaggataatgagctgaactgggaggttgcaaaagaacttctgacagacttgggcgtggaactggattgggcggaggatggccggatatgtctggacaagttccaaaaatcatcggagggttattacgatatcattcttatggacatacgaatgccgcatatgacaggatatgaagccacaaaagcgattcggggactgaatcaccctgatgccctgtcgattccaattatagcgatgagtgcagatgctttttctgatgacatacaacgttgcttggagttcggtatgaatgctcatatagcaaaacctattgatatcgtggaagtgtcccgtttactgaaaaggtttctgacttaaggtgccttagaggatatttagaggaaaatatggtaaaatttaactataatctgcagcgattttacaaatgagaggagaatcaaatgaaaaagagagtaagaaagctgtttcttatggcaagtattctgtgtgtcgtgagccttgtggtgtgtgcctgtggaggtaaaaaactcgaacagatagatgcagttgaaactgctccgacacagcaaccagaggagtcaggtgaaacaccttcggaagagaaggcttccactctagaatcatttacagaaaacactttcgagaaatgggaagacagcaatccgaatctggaaggaagtattaaggagctccaggaaggacagttcacagttgtagaggctattacagaaaaagcagacaatggcggcgatatcgtggtatccccaggaaatggtgatgattcggaatttaacaaagtcacggttacatatgatgagaataccatagtcgcaatacagactattaagaatggaggggacagttatgaaatgtcagaagcaactgctgattttctgtcagaaggtcatatggtgaaagtatggggaacaccgtccagcaatggactgaaagcaacctggatttgtatcgtgatggttgtataaatatccgaaaaaagtaattaggatactttgggtgataagagaatggataacctagttcttaaaatagtaatattaaaaaaacttgactagtgaaagatgacgaaatagaaaaatcaaatatgtttgcaaaaaaatcaggagagtaatagtgaagttatttcagaagatgaaagtgaaaaaagtgtacctgtgttatctcttaatattgcttattataatgggtattcttctgataatagttctgtatgggaaacagaacagcagcaaagatggaaatatccttgctggggcaagtccggatacaagtgctttccagttttattattttgatgggaaagccgttacactaagaaccctgtacgaccccgccatggaaaaagaattgataaaaaagattaatgcactacctatggagattgcagacaaagatgcaattgcaggtatggaagttcccttttatggaatacggattagtgataaggagggatatgatattaccgtggcactatccaaaggtgtctggcttaaaaatgacggtacgatttattatggggacacagacctttcacttttatgggaacaaatggagggggaggatgaggataattccctaacggtgctgaattttcccaatgcagggcttttgaccgcctatcatctgttctttatgatgaaagcggaggaaccggatggggaagtagtggaaggggtggttatgtctgtggaggatattcaaccaagtaggattaccgtgtctattacaaataacagcggtgaagaattttcttacggcagatatttctctctccagaagcagatagacggccagtggtacacgatgccagttcaggcagataatataggttttgaggatttagcctgtgtcttgccagatgggaaaagtgcgagtgaaacatatgaccttaatatttatggaacgctggagccgggaatatacaggctggtggtacaaaatttaagtgctgaatttttagttggacacggtaatctgtccgcaaaaagggattgaatgtaatgatgaggcagaagctcctgatggctgggcaaagtggattattcctggttatgagtacatttatgtggaacgtgacagtgaggattcttgttcaataaaatatttgaaagataatggtatctcattggtgggagcggttcatgattttattagcccgcttactgggaagaattatatgtttttttcaatcagaaagttatagataggtcagaaggttgcttttttcagtatgggaatgaatagattacagaggtacaattgtactaacgaagtgtgcttgtaataagaaagctccataatattgaaaaactaagtaggaaattgtatatatcataggtggtattattatgaaagaggtctgggatctgtatgatgccaaaggaaataagacgggttacacattggtacggggaagacctattccggaaggatgttatcatctggttgtgagtgtgtggattataaacaatcggggagaatatcttctttcccagagacatccggacaaaccatatccactccgctgggagtgtacagggggggcggtcctttcaggggaagacagtttgggtggagctctccgggaagtaaatgaagaattggggattattctgaatccgaaagatgggcagaggatttcccggatttgtcgggaacaaacgagggatttgtatgatgtgtgggtattttataaagatgtcgatatttcagatatcacacttcaggaaacagaggttgtagatgtaaaatgggtgacggatgaagagttgatcaagatggaacgaaaaggggagctgcacccattacttgcgctaacaatgtaacaaaaaagacttttttatggaggaaatctatgagaaattcaatttgtgggattgattgtatgaaatgtgaattaaaagaaacatgctatggttgtgctatgacagagggacatccttttcatggcgggtgtgtgctggcggcatgctgtctaagtaatggatatgagcattgcgggaaatgccacaatgaaaaatgcaggcttaaagaacagatgattgcagaattctgtatgcttggcattgaagatatggaagaaattactgggcttaatgcgtgcaagggatcatatatcaatcttacatatacgttttcgagcggtcaggcagtgaaactgttagatgatgacaagatatatttaggtaaccagcttagcaaaaaagatagtagcagatactatgggatagcagcggatgagagcgttctgatagttagtgaatatgatgcggatggatccaatgcggagatcattgtatataaaaaaagaaatattaaaaggtagacggaagtaatatatctacaatgagaagaaaagaagctgttttatcagcttcatgaagttattaatcctaggatatttttaagctttgataagcggtatagtccttggtgtactgattgggcttcacccaatcttgaataaaagcctgcagccgattattttggcgctgaaatccattcctccattaatacttgatcttatcgtactacttcctacatttcatctactatccgaggcagtaatagttatcggcagcatttgctcggtttttgtggaacaattaatgggagtgtattaattgaacaggggtattttgacaatgccatggtaatggggacaagagcattaaaaagtattttgtaatcctgcctgccgcataaccgcatattacatttggagctatcacattaaaagttttctttattttgctggtgattgtagaaatatctgtcacaaatattatgaatataatgttcataaagggtaaaatatagtatattgcatatgctatcaatcaaggatctctgaaacgaataaaacttaaataagattgtagaatcagtgggatagctatataaataaggtgatatttccgtataagcaacaggaggatattcaaatgtatgatataattattattggagctggaccagccggtatcagtgcagctatttatggaaaaagcagaggaaaaaggattctgatgttggaaaagaatcaggttggcggtttgattggaactgtctcaacagttacgcattatactgcaatcatgaaagaagaatctggtaagacatttgctgaacgtatgaaagagcaagcacttagtgccggcgtagagattcgttatgaaaatgttacagagacaaagctcataggtaatattaagaaagttgttacagataaaggcagttatgaatgtaaaacagtaattctagcgaatggtggttctggtcgtatgttaggaattccaggtgaaagtttaaaaggtatcagattaaatgcaccaaaagatggttttgattataagggtaagaatatctatatcattggtggagcagatggcgcagtaaaggaagccatttacctggctggaattgcaggaaaggtaacaattgtatgtgtggaagatgaacttgtatgtatacaagaatttaaagataaagttgctgcataccataatattgaaattatgccgcattcaagtctcacagccgtatatggtaacgaaagagctgaggagcttgaatttacggacaacaaaacagggaaaaaacagatcataaaggatgcagagtgcggagtatttgtatatgcaggtattgttccgaacactcagatatatacggaattgaagttagataacggatatattccagtggatgaattgatgcagacagaaattcccggagtttttgctgcgggagatatctgtgtaaaaaaggtaagacaggtagctacagcagttgctgatggagcaatcgcaggaatacaggctgcagcagtgtgttaataaaaacagctggtaatgggttgatataaatttccaaatatatccttagatgttttttagagaagtatttgctataatcgtatttgtaaaacattaaataacctcatttaagaaaggagttatgagtcgtgaaaagaaagattgcaatattattaatgacaggaatttgtctgatgaatacagtaccctgttttgcatcccagtcgtcgatggtcagtgtttccaattccgaagaagctcaatataccacgctcccggatgcagatactctgcaaaaagatgtgggattcaagcctaaggccccagaaaccctagcaggcggttatcagtttaatagtggtcatataacagaattatttgatttggatacaaatggcgctcaaatcaacaaacataaaggtatagacttccaatatttaaaaaaggacaataataccaccaaatcggtttccttgtctgccgaaccggcatcagggcaatctctttcaaaagatactattgttataaaacatggggaaatagatatgtattatggtacggctcaggctaattctctgtcttggattaatggggatgtttgctacagccttatggacatcaataagaatgtttcaaaagatgaaatggtggcaatggctaaagatatgattgattagctatatccattataactagtacaattaagagtaaaaataagaatagggaatgtgaatttcctactcttatttttttgcagagcagcagatgctgctccgttattttaacataaatagatgcatccttcactagaatctctttatagaatattattttttcattatgcattggcattccgtacagcaaattttcttctatcccctttttcacgttaacagatacacaaagcaacccatatgcgtataaagaaaaaatgttagaaggatattcgactgccaaatagacgctattgtacgttttatacatgaaagataaggagtttataagagacatgaaaaaagaatacattaatatgaatgtattcgatgcattgcagaagagatttgcttttttatttcaggaatttaaaaatatttatatctcattcagcggcggcaaggatagcggtgttcttttgaatttgctgctggattaccggaataagtatgcttcagaccgtgtgattggcgtatttcatcaggattttgaggcacagtatactgtaactacggattatattacccgcacttttaagcgactggaaaatggaccaggtatagacctttattgggtctgccttcctatggctactaggacagcactgagtagttatgagatgtattggtatccttgggatgataccaaacaggatatatgggtgcgcccgataccggagtatccctatgtcattaatctggcaaagccttttacccactatcgttaccagatgcatcaggaagacttagcaaagcagtttgggcgattctacaaggagaagcatggtaacggcaggacggtctgcctgcttggtatgcgggcggatgaatctttgcagcggtacagtagttttatcaataagaaatacggttatcaaaatgagtgctggatttccaggcagtttaaagacgtatggtgtgcctcacctttatacgactggtcaaattctgacgtatggtgtgcgaattatcgcttcaattatgattacaacaatttatatgatctgtattataaggcaggattaaaaatagaccagatgcgggtagcatcgccttttaatgattactccaaagatgctttgaatctgtaccgggtcatcgacccggaaatatggacgaaactggtggggcgggtgcgcggagcaaattttggtgcgatttatggaaagacaaaagcgatggggtaccgcagtattgcgttaccggaaggtcatacatggaaatcttatactcattttttgctggatacattgcctgctcgtctgcggaataattatgcgaaaaagtttaatacctccatccatttctggcatgagaccggaggtgggctgccagaggaaacaatccgtgagcttttactgatgtgtgataaagaagtaatagaagtgtaaaaaattttgccgttcctatccggcacatgaggtatgtcggataggtcgggcggttattcgggcaagtccaccttgccaacaaaagaataataaatctcaatgtcctgcctacgggtcttgttctcgtcatagctgcactcatgcacaacgattttctctacaaactcccgcaacagagtaggggtaagttcttcaaagctggtatgccgccgaacaacattcataaacttttctgcgttcacggtggcttcctgtgctttggaaagctccgcttggatagcagcggctctttctttcagctcccgttgttctgcttcatagtctgccgacagctctgtgaaacgctcgtctgatatgcgcccggtcacgctgtcctcatacagccgcttgaaaatagcggataactcggctatgcgtttctcggcggcttccagttcctttttcttggcggcgttcctgcgcttgcccccgtcctcgttctgctcaatcaagagcttcataaaccgggcttcatgctttgccgcatagcttgtcactttccgcagattggagagtacgccagcggtcaagaggtcggtgcggataaagtgcgccgtacagtcatgggtgcgtttcttgtagttgccgcagatataacagtcctgcttgcgcttgtccgtctggtatcgctgctgatacatgacactaccgcagtccgcacagaacagtatgccggagaacaagcccacttcatcatagcggttggggcgtttgcgctgcttgcgaagttcctgcacccgttcccatgtctgggtgtctatgataggctcgtggtggttctcgaaaatcacttgcttttccaggggattttctacactgtgcttgactttgtaagagagcttttctgtcttgaagtttaccagacagcctgtgtattcccggttttcaaggatatgcacaacggtattggtcgcccacttgcactcatagccggggtggtagcggcgggtgctgcccgtcctacggtattccagcgtccccggcgtgaggatttgctgctctgtgagcatacgggctatcttagtcggaccgttcccggcaaggcagaggttgtatatctgcttgactacgggtgcagcttcctcgtcaataatgaaattttcgtcctcgtccatgaggtagccatacacaggcttgcttgtgatgggcttgccactcatgccttttgagcgttttactgctttgattttcttgctcgtatctctcaccagccattcgttgaagataggttattcaagagggggaaagcaaacaggcaaaaagtcagtattcatgcgggtttgcggcgagatggctctcacaatctgacttccaaacagacaaacagccctacaatcgcatatcgtttctgagggagaatgtggattcacgtcacattctcccttttttcatatcagaaacgaggtgactatctttgaacgcacaaatcatcgccatcgccaaccagaagggcggcgttggcaagaccaccacctgcgccaacctgggcgtggggctggcacaggccgggaagaaagtgcttctcattgacggggacccgcagggcagcttaaccatcagcctggggcacccccagccggaccagctgcccttcaccctctcggacgccatgggccgtatcctgacagaccagcccctccgccccggcgaaggtatcctgcaccacccagagggcgtggacctgatgccagcggatattcagctgtcgggcatggaggtatcgttggtaaacgccatgagccgggaaacgatcctgcggcaatatctggacaccgtaaagggacagtattcccatatcctcatcgactgtcaaccctcattaggtatgctcaccgtcaatgcccttgccgccgccaaccggatcatagtccccgttcaggccgagtatctgcccgccaaagggctggaacagctgctcacgacagtcagcaaggtcaagcggcagatcaacccaaaattacagatagacggtatcctgctgaccatggtggataaccgtaccaactttgccaaagagatcgccgccctgctgcgggagacttacggcagcaaaatcaaggtgttcggcaccgagattccccactccgtccgggcaaaggaaaccagcgccgagggcaagagcatcttcgcccacgatccgggcggcaaggtggccgagggctacaaaaatctcacgcaggaggtgatacggcttgaaaagcagcgcgaaaaaagtagagctggcatcggtagatgacctgttctccaccgaggaaagccgcgccgatgcggggtgggaacgggtgctggaactcccattaagcgagctgcacccattcaaggaccaccccttcaaggtaaaggacgatgacgccatgatggaaaccgcagacagtatccggcagtatggtgtgctggtcccggcgattgcccgcccggaccccaacggcggctatgaattggtggccggacacaggcggcaccgggccagcgaactggccggcaaggaaaccatgccggtcattgtccgggatttggacgatgacgcggccaccatcatcatggttgacagcaatttacaacgggaaagcttgctccccagcgagagggccttcgcctataagatgaagttggaggctgtcaagcatcagggcgcaagaacggatttaacttcggcccaagtcgggcctaagttaaccgccgcagaaaaaatcgcagagaatagcccggacagcaagtcacaaatcaagcgatatattcgcctgaccgagctaattcccgaactgctgaacatggtggacgagaggaaaattgcctttaatccggcgtatgagctgtctttcctcaaaccagaggaacagaaaatgctgctggaaacgatggactatgaacaggctaccccttctctctcccaggcccagcgcatgaaaaagttcagccaggacgggaaactcaccagtgaagcgatgctggcaatcatgtcggaggaaaagaaaagcgatctggataaagtcaccctttccaccgacaccctccgcaaatattttcctcaaagctacaccccgaagcgcatggaggaaaccatcatcaagctgctggaacagtggcagcgcaaacgccagagagagcaggaacggtgaaaggagcgcctatgagagatattgccgccagagagttaaagggccacaacatactggctgtggagcggtttggagataaaaccagctttatgattgagttttctgtcctgcggccccgcaccgcctatggcgaacccggagacgaggcgcggctgtttctggacgaggacggctatcaggccgccctcgccagccagcagcgccgggacatcaaaatcaagcggtatgcccgcgtcattgaagggcatatcctcgacttcaagccgaaaaagaaacgccacccgtaaacccagcacaacgagaggaaggactgaatatgtgtaccgttaaggaaatcagggaagcgatccgggaggactgccgctcccagcacgatatgggaaccatggagatcgaccgcattttccaaaccctgccgttttctcagacagaccgcctgtttgacaaaccgcccatgccgccgttctcgaaccggcgcaggaagaagtcaagcagcaaataaaagccacaatcttttttcaggattgtggcttttcttatgccctgagaaatggaaggagtgcaggaaatggctatttttcgcgtagaacgcacacagggatacaccgttatgagcaactaccacctgcgggacaaaagcctgagcttgaaggcgaagggcttgctgtcccaaatgctgtcgctgccggaggattgggactacaccctgtccgggctggcggtcatcaaccgggagagcaaggacgcgatccgctccgcggtcaatgagttggagaaagctggttacatcaagcgccgccagaccaccgacgcaggcggcaagttcagcggcaacgagtatgtgatccatgagcgcccggtcacagaggaaccaccacctaaacaaccgtcgttggaaaaaccgttgtcgggaaatccgacgacggataatccgtcagcgggaaaaccgtcgccggaaaatccaacgcaaataaatatagatcaagtaattacagaccaatccattacggacggatcaagtaccgattcgattcctttccgggaaacggcggcggcaagaccgccggaaccgaagcgaagggaaacgatgtccgatgcggagagaaatagttatcgggaattgattttggagaacatcgagtacggctatctgtgtcgggacttccagctttaccgggacgatctggacgaaatcgtggagctgctggtggaaaccgtctgcgccagccgccagaccacccgcatcgccaaaacagactttccccatgaggtagtgcgttcccggctcttgaagctgaacagcgagcatatccggttcgtcatggactgcctgcaaaaaaacaccaccgaggtgcggaacatgaagcagtacctcctgacggtgctgttcaacgcgcccaccaccatgagcaaccatttcacttcgcaggtcaatcacgacatgaacgcaggcggctggtaaaggccgcttttttcattccacaaccacaacaacgattttgggaggtacaacatgaacatggaaatcatcaaaaacccggagtttggcagtatccgcatgatcgagcagggcgggaaaatcttgttttccggtacagacgtagcaagggcgttagggtatgcgattccgacaaaagcagtaaatacccactgcaaaggggtttccaaaatggaagcccctacaaatggcggtatgcaaaagctcctgtttatccccgaaggcgatgtgtaccgcctcatcgtccatagcaagctgccatcggcggagcggttcgagcgatgggtgttcgacgaggtgctgccctcgatccgccagcatggggcctacatcaccccggaaaagctgtgggaggttgccacctccccggaggcgctgatgaagctctgctccgacctgctggccgagcgcaaggaaaacgcggcgctgcgggaggaaaatgccgagctgtccggcaaggccgttttctatgacctgttcatcgacctgaagcacagcaccaacctgcgcaccaccgccaaagagctggtggtgccggagcgccggtttatccggttcctgctggaccggcgctttgtctaccgcgccccgtccgggaatgtgctgccctatgcaaagcctgccaataacggcctgttctgcgtcaaggacttctgcaaccatgggcataccggctcttacacgctggtgacgccggagggcaagctgtactttgccgggctgcgggagctgattttagtcacaaattaacgtaacgcgcaatctgcgggaaaggaggcaaaacacccatgcaggacgaagtggaaagcaaaaccctgaccctcattgtcagcggcgcgaagtttaccggcagactgttcaaagcggccattgtgaagtatctggcctacctgaaggaacagcagatgcagaagcggcgggaaaaaagcaccccgggcaagccccagggcaagcagacggtgaaacagctggtgggccagaatcagggcgtgtccaacatcgaggtcacagacccgtcggtgaaggcgtttgaccggatcgcccggaaatacggcgtggattacgcggtcaagaaggaccggagcagctccccgccgaaatacctcatcttcttcaaggcccgcgacgcggacgcgcttacctcggccttcaccgagtacacccagaagaaggtccgcaaagcggcccgcccgtctgtgctggcaaaactcagtcagttcaaggagctggtgaaaaatgcggtggtggaccgcaccaaacggaaggagctggaacgatgaaaaagccattggatatgaaaaaactcgttctgctgaaccttccgtatctgctgatgggcctgttcgccaccaacttcggggaggcgtggcgcatggcacagggcgcggacgcttcggaaaaggtgctgtccctgatctctgtcctcccggcagcactcagcagcttttggcccagcttccacccactggacctgttcatcggcctgtgctgcggggcggcgctccggctggcggtctatctcaaaggcaagaacgcgaagaaataccgccgtaatatcgaatacggttcagcccgttggggaaccccggcagatattgccccttacgccgatccggtgtttcagaacaatgtgattttgacgaaaactgagagcttgaccatgagcagccgcccgaaggaccctaaaacggcccgaaataaaaacgtgctggtcatcggcggttccggctccggcaagacgcggttttggctcaagcccaacctcatgcagctccatagttcgtatgtcgtcaccgatccgaaaggtacgatcctggtcgaatgtgggaaattactccaacgtggcgcgccaaagctgggcaaggacggaaagcccatgaaggacaaaaccggcaaggtcatttatgaaccgtaccgcatcaaggtgctgaacaccatcaattttaagaagtccatgcactataaccccttctcgtatatccacagcgagaaagacatcttgaagctggtgacaactttaattgcgaacacgaagggagagggcaagtccggtgacgatttttgggtgaaggccgaaacacttttgtactgcgccctcatcgggtatatccactacgaggccccggaggaagaacagaacttctccaccctcatcgagtttatcaacgccatggaggtccgggaggacgatgaggaatacaaaaaccccgttgacctgatgtttgacgcgctggaagccgaaaagcccaaccattttgcggtacggcagtataaaaagtacaagttagccgcaggcaagacagctaagagcatacttattagctgcggcgcgcggctggcggtctttgatattgccgagctgcgggaggtcacagcctatgacgagctggaactggataccctgggagactgcaaaaccgccctgttcctcattatgagcgacacggacgatagctttaacttcctgatctccatgtgctatacccagctgtttaacctcctgtgcgagaaggccgacgatgtgtacggcgggcggctcccggtccatgtgcgctgcctgattgacgagtgcgccaacatcgggcagatcccaaagctggaaaagctggtggccacgatccgcagccgggaaatctcggcctgtctggtcttgcaggcacagtctcagctgaaagccatctacaaggataacgcggacaccatcatcggcaatatggatacctccatcttcctgggcggcaaggaacccaccacattaaaagaactggccgctgtgctggggaaggaaaccatcgacacctacaacaccggcgaaagccgggggcgggaaacctcccactcattaaattatcaaaaattggggaaagaattgatgtcgcaagatgagcttgctgtgatggacggaggaaaatgtatcctccagctgcggggcgttcgccccttcctgtcggataagtacgacatcaccaaacaccccaattttccgtacaccgccgacgcggacgagaaaaacgcctttgacattgaggcgttcctgtccacccggctcaaaccaaagcccggcgaggtctacgacgtgtttgaagtagacgatccgggcgaataacctcgttccgctgtgaaaggagtggtcttatctattgtcccaaccgcctcggtagaggccattggcgtacaaagcggacagcacatcaaaaaaatgaagaaggaggacagccggaatcgaaccgcccataaattcagggcggttttgttgtccggcttttgtatgcctatgaaccaacacaaatcataaacgattccggctaacacaatgtatggaattctttaactctgctatcgaagttttgcagaccctcgtgatcgcgctgggcgcgggcctcggcatctggggcgttatcaaccttctggaaggatatggcaacgacaaccctggcgcgaaaagtcagggcatgaagcagctcatggcgggcggcggcgttgccctcatcggcatggtgctggtacccctgctctccggcctgttcggttaatcgcccatcaacccacccaaccctttgcccctcctgctttaagcgggaggggccggaaggaggtaaacctgtatggatttcttactggacgccatcaccacatggctcaaagaaatgctggtaggcggcgtcatggataacctctccggtatgttcgatgcggtcaacaatcaggtggcggacgtgtcggcgcagatcgggcagaccccgcagggctggaacgcggatattttcagcatgatccacagcctgtcggagacggtcatcactcccatcgccggggtgattttggcctttgtgatgacgctggaactcattcagatcatcaccgacaagaataaccttcacgacattgaaaccgctgtgttcttcaagtggatcttcaaaaccgcctgcgccattctcatcgtcaccaacacatgggatattgtcatgggcgtgttcgacctgtcgcaaggcattgtggcgcaggcttccggcgtcatcggcgcggacgcctccatcgacatctccaccgccatggcggaactggaaccgaagctgatggagatggatttggggccgctgttcggcctttggttccaaagcctgttcatcggcattaccatgtgggcgctcaccatctgcatctttatcgtcatctatggccgtatgctggaaatctacatcgtcacctcagtggccccggtccccatggccgcgatgatgggcagggagtttggcggcatggggcagaactacctgcgctctttgttggcgctgggctttcaggcgtttctcatcatggtctgcgtggcgatttatgcggttctggtgcagaacatcgccaccgatgaggacaccatcgccgccatctggtcctgcgtgggatatactgtcctgctctgcctgaccctctttaagaccggcagcatggcgaaggcaatctttcaggcccactgagaaaggagtgcgcgaaatggcttatgtaccagtccccaaagacttaaccaaagtgaaaacgaaggtcatgttcaatctcaccaaacggcagctaatttgcttcggcggcggggcgctcatcggcgtgccacttttctttttgctccgggaacccgccggaaacagcgccgccgccctgtgcatgatgctggtcatgctcccatttttcctgctggcgatgtatgagaagaacggccagcccttggaaaaaatcatcggcaatctcattcgggtgtccttcctgcggccccggcagcgcccctaccagaccaacaacttctatgccgcattggagcggcaggaccaattagacaaggaggtgtaccacattgtttacggcaaagaaacaccagacaaacggcaaagccgctgaaaaagaagcgccggtgcaggccaaacgcaaacttacccgcgcggagaaaaagcagatcgcagccgccgtttcccgcgccagccgcaccgataggaagggtatctccgcacaggacagtatcccctatgagcgaatgtggccggacggtatctgccgggtggcggacagccactacaccaaaaccattcagtttcaggacatcaactatcagctgtcccaaaacgaggataagaccgccatctttgagggctggtgcgatttccttaactattttgacagctctatccggttccagctgtccttcctcaacctggcggcgtcccaggaaacctttgcccggtccatcaccatcccgccccagggggacgattttgacaatatccgcagcgagtacacccagatgctccaaacccagctggcgaagggcaataacggcctgattaaaaccaaatacctcaccttcggcattgacgcggacaatatcaaagccgcaaagccccggttggagcggatcgaaaccgacttgctcaacaacttcaagcggctgggcgtggcggcggaaccgctggacgggtatgggcggctggcccagctccatggagtgttccacatggacgaacaggttccattctgtttcaactgggattggctggccccctccggcctctccaccaaagactttattgcccccacctcctttgagtttcccaatggcaggcagttccgcatggggaaaaagtacggcgcggtcagcttcgtgcagattctcgccccggagctaaacgaccgtatgctggcggaatttctggatatggagagttcgttaatcgtcagcctccatgtgcagtccttggatcaggtaaaggccatcaagacggtcaagcggaagatcaccgacctggaccgggccaaaatcgaggaacagaaaaaagcggtcagggcagggtacgacatggatattattcccagcgaccttgccacctacggcagcgaggccaaaaagctgttacaggacttgcagagccgcaacgagcgaatgtttttagtcacgtttcttgtgctgaacacagcggacaccgccagacagctggggaacaacgtctttcaggccagctccatcgcccagaagtacaactgccagctggcaaggctggacttccagcaggaggaagggctgatgagctgcctgcccctgggcctgaatctggtggagattcaaagagggctgacaacgagcagcaccgccatctttatcccgttcaccacacaggaactttttcagaatgggcgcgaggcgctgtactacggcatcaacgccctgtccagcaacctgattatggtggacaggaaaaaactcaaaaaccccaacggcttgatcctcggcacccccggctccggcaagtcgttttcagcaaagcgggagatcgccaactgctttttgctcaccaccgatgatattattgtctgcgatccagaggccgagtacgcgcccctggtagagcggctgcatgggcaggtcatcaagatttcacccaccagcgccgactacatcaaccccatggacctgaatctggactactcggacgatgaaagcccgctgtccctcaaatccgacttcatcttgtccctgtgcgagctgatcgtgggcggcaaggagggcttgcagccggtgcagaaaaccatcatcgaccgctgtgtgcggctggtctaccgggattacctgaacgacccccgcccggagaatatgccggtattggaggatttgtataatcttctgctgacccaggaggaaaaggaggcccagtacatcgctacggcgctggaaatctacgtctccggctccctcaacgtgttcaaccaccgcaccaatgtgaatatccagaaccggatcgtctgctacgacatcaaggagctgggcaagcagctgaaaaagatcggtatgctggtggtgcaggatcaggtgtggaaccgcgtcaccatcaaccgcgcggcgcacaaatccacgagatattacatcgacgagatgcacctcttattgaaggaggaccagaccgccgcctataccattgaaatctggaaacggttcagaaagtggggcgggattcccaccggcattacccagaacattaaagacctgcttgccagccgggagatcgagaacatctttgagaactcggactttgtgtatatgctcaaccaggccagcggcgaccggcagattttagccagacagctgggcatctccccccaccagctgtcctatgtgacccactccggcgagggcgaggggctgctgttttacggcaacattatcctgccctttgtggaccggttccccaaaaacaccgaactctaccgcattatgaccaccaaattgtccgacctgtcggaagtgaaaaagttgcaggaacagaaggaggaaccccgccgggaacacccgcagaagcgctctgccggtgatgggagggcgcgatgaggaaggaaccgcgcctgcgctttacggatcaggagcgcgaggacccggcgctggaaaagccaatccaccgcgcggagaaggccgctgaccgggcagacaaagcgcaggccaaactcccgaaaaaggcggtccggcgcaccgtcaccgatcccaaaaccggcaagccaaccaccaaactgacctttgaggaagaaaaaaagccgccctcgaagctggcccataccgtgcgggacacccctgttcgtgcggcactggcgaaggtacacaaggagatccgggaattggagcaggacaatgtgggcgtggagggcgcgcacaagaccgagcaggcggctgaaaccggggcgcggctggtgcaggcgggctatcgcagtcataaattaaagccctaccgggaggcggcaaaggccgagcgaaagctggaaaaggccaatgtcaacgccctgtaccagaagtccctgcgggaaaatccccagtttgcaagcaacccgctgtcccgctggcagcagaagcaggccatcaagaaggaatatgccgccgccaaacgcgccggtcaaaccgcccagactgcgggaagtaccgccaaaaatgttcagaaaaccgggaaagccgccaaagccgcgaaggagaaggcacagcaggcgggccggtttgtcatgcggcacaagaagggctttgccatcgcgctgatcctgttcctcatggtctgcctgctgatgaactcgctttcctcctgctccatgctggcccagagcatcggttcggcggtgtccggctccacctatccctccaaagacggggatatgctggcggtggaggcgaactacgccgcgaaggaggccgagctgcaagccgagctggacagcatcgaatccacgtaccccggctatgacgagtaccgctacgatctggaccccatcggccacaatccccacgagctggcctcctacctgagcgccctgctccacgagtacacccctcagagcgcggcagcggagttgcagaaaatctttgacctccaatatgtgctgacgctgaccgaggaaattgagatacgcacctacaccgacgaggacggggaggaacacgaatatgagtaccgtatcctcaacgtggaactgaccaatacccagatttccgtcctcgcgccggagctgctcgccccggacgagtacgaactgtatcaggtctacatcgccaccagcggcaacaaacccctgctgttcggcggcggttcccccgacatgggaaattccgaggatttgagcggcgtggactttataaacggaacccgccccggcaatccggcgctggtggagctggcgcaaagtcaggtgggcaacgtgggcggccagccctattggagctggtacggctttaacagccgggtagagtggtgcgcctgctttgtgtcctggtgctacaaccaggctggcgtcagtgagccgaagtttgcaggctgtcagtcccagggcgttccctggttccagtcccatggacaatggggcgggcgcgggtatgagaacatcgcccccggcgacgccatcttctttgattgggatttggacggttctgccgaccatgtgggcattgtcattggcacagacggaaaccgggtctatacggtggagggaaattccggcgacgcctgcaaaatccgaagttatgatttgaactatgaatccatcaagggctatggcctgatgaattggaattaggccagttggaaaggagaaggaaccatggctatgagtaaaattgaccgcatcgaccgggaaatcgcaaaggtgcgggagaaactgatcgagtatcaggagaaattgaaggtcttggaggcccagaaaaccgaggcggagaacctgcaaatcgtccagctggtgcgggcggtccgcatgaccccgcaggagctaaataccctgctgtcaggcggcagtccggcgctccctgcccccactgaggaaaaggaggaaccccatgatgaactctaaaaaaaggaagctgctgacctcattctgcgccgccctgatcttgatgggcggcttttccatgcccgcctatgcgggcggcggcgggcaactggccgatgacaccaacgatgtcaatgtgcgggtggagccgcccaaagaggaaccgcccctcaccccggagggcaacgccatgttggtggacgattacggcggcaataagcagctcatcaccgtcaccaccaaaaacggcaattacttctacattctggtagaccgggatgatgagggcgagaacaccgtccacttcttaaatcaggtggacgaggccgacctcatggcgctgatggaggacgagagcgacgaggaaccgcctgcggtctgcacctgcgctgaacaatgtcaggcgggggccattgaccggaactgcccggtctgcgcctttaccatgaccagctgcaccggcaaggccccaaaaccggaggaaccgcctgcgccagagccggaacctgagaagaaatctggcctgaacccggcagtcctcctattggtgctggcgctgctgggcggcgggggcgcgttctattacttcaagttcatcaagaacaagcccaaaaccaaaggggcaaacaacccggacgattacgactacggcgacgaggacgaggaatccgaggacgaactgtgggaatccgaaaccgatgcggagccgggagaaagcgaggatcaggtggaatgacccgctttaccgacagcccatttgaacgcatgatgacgcagaaaccagagggccggaagaaagtttccggccctccccctttgcccaaaggccacccctgctatggctgcggcagctacgggaggccctgcgtaggcttttgccaccgggaactggaaaaagaactgagagataggagggcgaaaagccatgaaacttaagctggtgattgcggaaaagccctcggtggcccaaagtctggccgctgtgatcggggccacgaaccgcaaggacggatatttagaaggaaatggctggcttgtcagctggtgcgtggggcatctggccggacttgccgacgcggaccgctacgacccgaagtacgccaaatggcgctatgacgatctgcccattctgcccgccgaatggcaaatcgaggtgggcaaggacaggaaaaagcagtttgatattctcaaaaagctgctgaacggcccggacgtgaccgaggtggtgaacgcctgcgacgcggggcgggagggcgaactcatctttcgcaatgtgtatgagctggcgaactgccgcaaaccgatccagcgcctctggatttccagcatggaggattcggcaatccgggagggcttcgccaacctgcgccccggcgcggactatgacggtctgcatcaggcggcgctctgccgcgccaaagccgactggctggtgggcatcaacgccacccggctgttttcggtgctgtatcaccggacgctgaacatcgggcgagtgatgtcccccacgctggccctcatcgtccagcgggagacggagatcgaagcctttcagccggaaccgttctatacggtatcactggaactgccgggatttgccgctgccggggtgcgcatgaaggacaaagccgccgccgagcagctgaaaaattcctgttccaatgctgcggtgacggtcaaacaggcccagcgcaaagaaaaatccgaaaagccgcccgccctctacgacctcaccaccctccaacgggacgccaaccgcctgctggggtttaccgcccagcaaacactggactatctgcaaaacctctatgaaaaaaagctgtgtacctacccccggacggacagccggtatctgacctcggatatggcggaggccctgccggtgctggtgaacctcaccgccaaagcgatgcccttcgccaaagggatcgggatcgactgtaacccggaggcggtcatggacaacaaaaaggtgtccgaccaccacgccattctccccacccagaacctccggggcgcggacctgtccggcctgcccgctggcgaaaaagcggtgctggagctggtatccctgcgcctgctgtgcgcggtagcggaaccttatctctacgaggaaaccgccatcacgctggactgcgccggtcaggagtttgccgccaaaggcaagacggtgacgcgccccggctggcgggcgctggacaacagctatcgcaccagcctgaaaaatgccccggaggacagcggagaggaaacggctctgccggaactctcggagggacagtccttgcctgtctccaacgcctccgtcaaggagggcaagaccagcccgccaaagcatttcaccgaggataccctgctctccgcgatggaaaccgcaggaaaagaggatatgccggacacagccgagcgaaaggggctgggtacgcccgccacccgcgccgggattttggaaaaactggtgtccaccggctttctggaacggaaaaagaacaggaaaactgttcagctgatgccctcaaaggacgccctctccctgattaccgtcctgccggaacagctgcaatccccgcttttaaccgccgactgggagtaccggctgggcgagatcgagcgcggggacctctccccggaggaatttctgtccgggattagcgagatgctccgggagctggtggggacctatcaggtcatcaaggggaccgagtacctgttctccccgccccgcgaggcagtggggaactgtccccggtgcggcggcgaggtggccgaactgcgaaagggtttcttctgtcagaatccgtcctgcaaattcgccatctggaaggacagcaagtggtggagcgcgaaaaaacagcagcccaccaaagccattgtcgcggcgctgctcaaagaggggcgcgcccacctcaccggctgctactcggaaaagaccggcaaaacctatgacgccgatgtgctgttggaggacaccggccagtatgtgaacttcaagctggactttggacagcggaaaggcgggaaagcatgaaattatcattggtcgagcaggaaacgatcctgctttacaatcaggcggagggcaccgccaatgtttacacccacgacccgaagctgatggagaagttggcccgccttgcaaagaagcacccggaccagattataaagaaggacgcgcacaatttcaccgtccccaaacgctgcgtgtcgatccgggagccgtacagcgcggagcggcgcaaagccgccagccagcgcgccaaagctgccgggtatctgccgcctgtccgaaaatctggcggtaaggcagaagaatgacggtctttgagacagtcaagcagtcggtcagcgccagagaagcggcggaacattacggcattgaggtcaggcgaaacggcatggcctgctgtccctttcacgatgacaaaaaccccagcctgaaactggaccagcgctttcactgtttcggctgcggggcggacggtgacgccatcgacctcaccgcccgcctctataatttgtcactcaaagaggcggcggtacagctggcgcaggattttggcctgctctacgacagtcaagcacccccgaagcccgatgtccggcagaaatccgaggtgcagaaattcagggaggcgcatcaacgtaccttccgggcgctggcggagtacggccatctgctgcgggcatggaaagccgattacgcgccccgcacaccggacgaggaaccccacccgctgtttgtggaggcggtacacaggcaggactatgtggagcatctgctggacttcctgatggaaggcagcgcggaggaacagaaacaatggatcgcggaacataccgcgtacatcaccaatttagaagggagagtacagaaaatggctgagaaacccaccaaccgggagcggctgcgggaaattaccgaaggcatcgagcagaacatcaaggaactgtttgagagtgaaaaatatatgcgctacctgtcggtcatgtcccggttccaccgctattcggtgaacaacaccatgctcatctatatgcagaaaccggacgccactctggtggctggatttaataagtggaaaaaccagtttgagcgccatgtgaaaaagggcgagcatggcattaccatcatcgcgcccaccccctacaagaaaaagatcgaggaacaaaagctggacccggacaccaaagcgcccatgctggacgcgaacggcaaggccatcatggaggaaaaagaggtggagatcccgctgttccgcccggtcaaggtgttcgacgtcagccagacggacggaaagcccctgcccgcgctggcggcgaacctgttcgggaacgtccagcactttgaggcgtttatggaggcgctgaaacgttccgcgccggttccccttaccgtagaaccgatggccgctgatacagacgggtatttttctcctgccaatcagcggatcgccattcgcgccggtatgagcgaggtgcagactgtctccgccgcggtccatgagattgcccacagcaagctgcacaactacgatctgccggagatcaaggacactgacttgtatgaggaagtggagctgttcgaccagcccgcgctgttctccaatggaagatttgcgcgggcagacctcccggacgggctgttctgctatgacctgcgcggttctgacgaggaccccggcgatcccgttgccgtagaggaacgggtgacggtcaaccacgccggttccgtcatcacaacaaaaccgctggaactgccggaggaaggctatcttccgctgaccggggacttcggcctgaacttcattggcgatgaaaaaacgatacagcagcttttgcaggagagcaaaaaggaccggaacaccgaggaagtggaggccgaaagcatctcctatgcggtctgccagtattatgggattcagaccggcgagaacagctttggttacatcgccacctggagcgcgggcaaggagctgacagagctgcgggccagcctggaaaccatcaataagactgccggggcgctgatctcggacattgaccgccattttcaggaggtctgcaaggagcgcggcattgatttgaaggccgagcaggaacagcaggaggccgcgcccgaacccagctggaaaatccccaccgaactgccggaacaggaccccgccagcttccgctactacatcacccaggaatcgctggacgtgggggcttaccccctaatggacggaaaaaccatcaccgagctggccgcgccggtaaaggtggagcaggataccgtcaccgcctttggctgcatcgactatccccagccgttgactgctgaacaggtgcgggaatacgcccttctccccgccagcggcaatcctccggttttggataattccatcgactacaccgccgaagccgatccgctgccaaacgcgccggagcaaacgctggacgaatatccgatgccggataccgcgatgcatgaggacgatctgagaaactgcggctatcaggacggggatttgctgcccctctccaaagaacgggcgatggagctgtttgaacaggatttgaccgtctatgcggtggtggacggaggctgcgcggaaatgctctttgaccgggaggaatttgaagcccagcagcccggtacggtgttcgccctctcccgcgaggaatgggaggaaagccccgcctttgacgcgctggtgcgggaccggcagaaccaccagcaggaacgggagcaggcgtttctctcccatgcgggcggctgtttcgccatctatcaggtgaagcatggcgatgagcagcgcgacattcgccgcgagggtctggactggctgaactccatcgggcgggaagtggagcgcaaaaactacgacctcatctataccgcgccgctgcaaagtgaggacaaaccggaggctgtggcggagcagctgttttaccgtttcaacaacgaacaccccaaggactatcacagcccttccatgagcgtcagcgacatcgttgccattcggaaggacggtgcgttatcctgtcattactgcgacagttttggattccagcagatcagcggttttcttgacgcaaatccgctgaaaaatgcggagatggcggtagaggacgattacggcatgatcgacgggatcatcaacaatggcctgaaggagcagccgacagtggcgcagttggaacagcaggcccggaacggccaacctatctccctgatggacttggccgctgccacccaccgggaggggcgggacaggcgaagatcggtggtggagcagcttcaccagcagccgaagcaggaaaccaaaaagacagcgccgaaaaagagcgcggaaagggagctttgatatggaacacttcacctttgaggaaatgaacctgatgtgcatttacaacaccggaacccgcgccggactgatggagaatctggccgagatgcgcggctatctctcgccggaggaatccgagctgcgggaactgaccgacagcgccctgggcaagctgaacgctatgaccgatgcggcgtttgcggaactggaactctacccggactttgacgaataagcagaccgaaaaccatgggggcggcgcaagccgccccttctctcttacccgaaaggaggatcaaacaccatgcagaccaaagcgcagatgtacgcacagctggccgatcaggtggcggtgcagctcacttccagctggaatgagtggatacagtttctaaacaccgcctcccggctctacaaatatcccttccacgaccaaatgctgatctacgcccagcgcccggacgccaccgcctgcgcggagtacggcctgtggaatgacaagatgggccgctacgtccggcgcggctccaaaggtatcgctctggtggacgattccggggagcggacccgcctgcggtatgtctttgacatttccgacaccggcacccgcgaacattcccgcaccccgcgcctgtggaagctggaggaacggcatctggattccgtttccgcgatgctggaaaaccgctatgaagtgggcggcggggatttgggcgggcagctgacggaaattgcccacaagctggccggggaatattgggcggaccatgggcgggacttcctctacatcgttgacggttcctttttggaagagtatgatgaatttaacatcgaggtccagttcaaagccgccgccactgtcagcatcgcctattcccttatgtcccgctgcgggctggccccggagcagtatttcacccacgaggactttatgccgctcttcgatttcaacaccccggccaccgtcggggcgctgggaacggccatcagccagatcaatcaggaggtgctgcggcagatcggcgtcaccgttcagaatcaggaaaggagaaacgaacatgaacatcaacctgacttacagccagaacggggattacctgattcccgacctgcaaatgaccgagcagccagccgcgcccctgggcaagtacggcagaatgaggaaagcctacctgaaggagcatcgcccgatcctctacaaccacctgctgatgcgcgagaagctgtacccgcacctgttggagaccgaccagaccgccaaccggaggctggaccagctgatgccgaagctggcagaagcggcgggcgcgaccgaggacctgaaagcccgcgacatgatggcgtgggtgggcctgatgaacagctgcaaggcccaggcggaggaaatcctgctggcggagcttatcaacaattaaccttagacctgttcctctccgaagcggaacaaatccagaagatagacgaagcagagaatgtaaccacattccctgctttttcttttgcccaaacggatatggaccatgtgctgcggctgggcggcaacaccgatcatctgcgggagcgtgtgaccgcagaatttgaaaagcagaaatctatttcggagatcgccgccaccctgcaatccctctaccatggcggcagcggctttaccactggttcgggcaatatcaccgtctggtacggcgaggacggaatccggctgtcccatggcaagtccgcccgttatgacaaagccgcgcaggtaatctcctgggagagcgccgccgagcgtatcggggaactgctggaatccggccagtttgccacgaatgtggagctggccgaggccgctggtcaggagcgctcccggctggcagggaagttttgggacctctatcacgatctcagcgacgaggccagagacgccgggtatctccaaagcctgtcctccatgcgcgggaatgggttcccggaggaaacccgctggctggccgagcagctgaacagcccggatttccgtcagacccttgccggtgaatatgccgccttctggactgcgtacagccaggaccgcggcctgctgcggttccattaccacagaccaaaagagatttgggagaacttaaaggatttatccttgccgcgcaaaaccttttcgtccgagatgacggaggtccccgctgtcaagcagttcatcaccgaggacgagatcggcgcggccctctccggcggcagcgacatcgagggcagcaagggccgcatttatgccttttttcagcagccccataccgacaaggaaaacgcgctgtttctcaggaaggaatacggaaccgggggccgctcccatgccctgtccgatgcgggaggcagctgggcggactatgacgggaagggcctgcgctatcggaaaacaaactgccccgatgtgcatttcacctgggagaaaaccgcaaagctggtttccggcctgatccaaaagggacgctatctgacggaatctgagcaggcacaggttgagaaaatccaggcagaaaaggcggtggcagcggcagacgccatagaatcccagcagccgccccctcccgattgggactacaacggcgtaaaagagcgccaccccgatgatgtggtgctgttccaggtgggcgatttctttgaactgtacggcgaggacgcgaaacaggcggccccggaactgggtctgcaccttaccacccgcccggttccgggcgcgggccgcgtagagatgtgcgggatacctggccatcagctggaacaggttgtggaacagttgcgggataagcatgatgtgacgatctctgctgtcccggagggcggcaccgaacggcaggaatattcccttcgctccatcgaccatgaggcggagcaggccatcaatgcccacgaagccgaatttggagcggacgggaccagagttttcggaaatggcgaggcagaacccgaaaagcccaccatcgaggaaccgctgcgccctctctcccaggacgatattgacgatgccctgtgcgcgtggaacggagatgtggacagcaaacgcgctgttgtccgctacatgaaggaccatgcgagggataaaaacaccgccgcatggctgtctcaggaatacggcggcggcaaaagcggccttcccgtccgggccggaagccccgaaggaatggaactgccctggccgaaggtccaacggcgcatcgcccagctgatccaggaaaaccatttcttcacacagatggagcaggaaaatttagacgatgtagaccccatcgcgatccgggagcatctggcccagcgcgggattgtaaacggacaggtgggagacccggagaagctggacaacgacccctttatccggcaagtgaccgccgatgtggaacagctggcggaggaaactttgccggaggacagcaattttccctattcggttggaaccattcttacctttgaaaagccgtacctcatctcgaagattcaaggcgggaaagtcacctttaccgatcaggaaaccgaaagccactggactgcggactacgcccatgtcgcaagcctgttgaaccgctatccgcagaaggaaacccaactgcctgcccgcgatccgctggcctcagcctatggtgtgggagatttcgtctttctggaaaacaccgaatacaagatcaccgacttgcagggcgactatgtgcagctgcttgaccccacgctgcgttatcccatttaccgaagtgaacgccgggagcagtttgagcgcgcgatccggcaggacccgcgcaaccgcgccatcaccgactatcttcccgccaacctggaacagtttgaccacgatctgcgtgaggtcctgaccggcggcttgctggattctgaggacaaggccgctgtcgcggacttgctccgaagcggcgcgggaaatccggcgattgcccagcatctttcccagcggtttgccggtacggtggaaaccatgcagctggaaaccggcgagacagcggacttccgggccttggaaaaggggctggaggtggaaatcctgcgggaagatgaaacggtgctggcaaccgtatcccaggattgggaacagcttgccgccgccctccgcgccctctaccagcaggaattggacgggtttacccatgaaccggtccagcccaaagaacagccggttttggaggaaccgcccgcgccggaaccggaacagctcacctttaccaccacgccaaccaccatctatccgggcgagcagaaccatctgccctatgatgtggtcattcagacgttacgcaccgagaaaccggaacccaccccgccgcagcccaccgctgaaaacttccgcatcaccgacgcccatctgggcgagggcgggccaaagtcgaagttccgcgccaatatggacgccatcaaccttctgaaagaattggaggctgagggcaggcaggccaccccagcggaacaggaggttttatccaaatatgtgggctggggcggtctggcggacgcttttgatgaaaataagcctgcctgggccaatgagtttgcagaactctatgccgccctgtccccagaggaatacgccgccgccagaagtaccaccttaaacgcccattacaccagccccaccgtcattcaggccatctatgaggcggttggcaagatgggattccagaccggcaacattctggaacccgcctgcggcgtgggcaacttcttcggtatgctgccggaggaaatgcagggcagcaagctgtacggcgtggaactggattccatcaccggacggatcgccagacagctttacccaaaggccaacatcaccgttgcaggctttgaaaccaccgataggcgggatttctacgatttagctgtcggtaacgtgccgtttggaaactatcaggtccatgaccgggcttacaataagctgggcttcaacattcacaactatttcttcgccaaaacgctggatcaggtgcgtccgggcggcgtggtggcctttgtcaccagccgctacaccatggattccaaagattccactgtgcgccggtatctggcgcagcgggcggagctgctgggcgcgatccgtctgcccaacaatgcgttcaaggccaacgccgggaccgatgttgtctcggacatcatcttcctgcaaaaacgggataggccgctggatattgttccagaatggacgcagaccagtcaaacggaggaagatttcaccatcaaccgctacttcctcgaccaccctgaaatggtgctggggcgctctgtctcggaaaacacccaatatgggcggcaggattacaccgtcgcgcccatcgaaggtttagagttggccgatcagctgcgcgacgccgtgaagtacattcgcggcacctatcaggaggcggaactgccggagctgggcgagggcgaagccatcgacacatcaatccccgccgaccctgatgtgaaaaactattcctacaccatcgtagatggtgaggtgtactaccgggaaaacagccgcatggtgcgcccggacttaaaccccaccgccgctgcccgcgtcaaggggctggtggagctgcgggactgtgtgcagaccctcatcggccagcagatggacggtttctccgacgaggccattcgggagacgcaggctgagttaaaccggctgtacgacagcttttccgcaaaatacggcctcatcaacgaccgggccaaccggctgacctttgccgaggattccagctactatctgctctgcgcgctggaggtcatcgacgaggaaggacagctgaagcaaaaagcggatatgttcacaaagcgcaccatcaagccccatgaggcggtcacgtccgtagacaccgccagcgaagcattggcggtttccatcgcggaaaaagccggggtggacatggcgtacatggcgcagctcaccggaaagaccggggaagaactggccggggatttgcggggcgtgatcttccgtctgcccggaccgctggccgagggcgaacgtccccactacgtcacctccgacgaatacctctccggcaacgtgcgccgcaagctgcggcaggcacagcgggcggcggaacaggacccggttttctccatcaatgtggaggcgctgaccgccgcccagccgaaggatttggacgcttcggagatcgaggtccggctgggagccacctggatcaacaaggaatatatccagcagttcatgtacgaaaccttccgcaccccattttatctccagcgcagtatcaaggtcaactacaccccctataccgccgagtggcagatcacccggaaaggggcggttggagacgacgatattgccgccaacgtgacctatggcacaagccgcgccaatgcctacaagattttggaggacagcttaaacctgcgcgatgtccgcatctatgacaccatcgaggacgcggcgggcaaggagcgccgggtgctgaacgccaaagaaaccaccctcgccgcccagaagcagcaggcgatccgggacgcttttcaggactggatttggaaagacccggagcgccgccaaacgctggtgcgccagtacaacgaggaaatgaacagcacccggccccgcgagtacgacgggcggcatatccagtttgcgggcatgaacccggagattaccctgcgggaacaccagaaaaacgccatcgcccatgtgctgtacggcggcaataccctgctggcccacgaggtgggcgcgggcaaaaccttcgagatggtcgccgccgccatggagagcaagcggctggggttatgccagaaatccctctttgtggtgccgaaccatctgacggaacagtgggcgtcggagtttttgcggctttacccctccgcgaacattctggtggcgacaaaaaaagactttgaaacccacaaccgcaagaagttctgcgcccggatcgccaccggcgactacgacgccgttatcatcggacactcccagtttgaaaaaatccccatcagccgggagcggcaggaacgcctgctccgggagcagatccatgagatcaccgaggggattgtcgaggtggaggaaagcggcggtgagcattttaccgtcaagcagctggaacgcaccaaaaaatcattggaggcgcggctggaaaaattgcaggccgaggggcgcaaggacgatgttgtgaccttcgagcagctgggcgtagaccggctgtttgtggacgagagccatagctacaagaatttgttcctctatacaaaaatgcggaacgtggccgggttatccacctcggacgcgcaaaaatcctccgatatgttcgccaaatgccggtacatggacgaaatcaccgggagccggggcgtggtctttgccaccggcaccccggtcagcaacagcatgaccgaactctatactgtccagcggtatctccaatatgagcggctgcaagagctgaacatggcccacttcgattgctgggcgtcgcgctttggcgaaactgtgaccgcgctggaattagcgccggagggcaccggctaccgggcgcggacgcggttcagcaagttttttaacctgccggagctgatgaacctgttcaaagaggtggcggacatcaagaccgccgatcagctgcaccttcccaccccggaggtggagtatcacaatattgtagccaaacctacggaacaccagcgggagatggtgaaagccctctccgagcgcgccgccctggtccattccgggacggtagacccctcgaaggacaatatgctcaaaatcaccagtgacgggcgcaagctgggcctcgaccagcggatcatcaacccgctgctgccggacgaacccggcacaaaggtcaaccagtgcgtggacaatatcctgcaaatctggcgggacgggcagggtgaaaagctgacccagctggtgttctgcgacatctccaccccacaggccgcgcctgccagaaaggtggcgaaggcgctggataaccccaccctccatgcgttagagacagcaattccagagccggagaaaccgcccacctttacggtctatgaggacattcggcaaaagctcatctcgcagggaatgcccgccggccagatcgtctttatccatgaggccaacaccgaggtgcggaaaaaggaattgttctccaaagtccgctccgggcaggtgcgggtgctgctgggcagtacggcgaagatgggggcgggaaccaacgtgcaggatttgctggtggcgctccacgacctggactgcccctggcgtcccggcgacctcgcccagcgcaagggacgcatcgagcgccagggtaaccggaacccgctggtccatgtctaccgttatgtgaccgaaagtacattcgacgcttacctctggcagacggtggaaaacaagcagaaatttatctcgcagatcatgacctcaaaatcccctgttcgctcctgcgacgatgtggacgaaaccgcgctcagctttgccgagatcaaggccctgtgcgccggggacccgcgcattaaggagcgtatggatttggacgtggaggtgtcccgcttaaagctgatgaaggccgaccaccagagtaagcagtaccggctggaagatcagctgctcaagcacttcccagaggaaattgagcggcacaaggggttcatcaccgggttggaggccgacatggagacgctggccgcgcacccgcaaccggcagagggctttaccggcatggaagtccggggcgacgtgctgaccgataaggaaaatgccggagccgccctgttggacgcctgcaaggaggtcaaatcctccgagccggtgccggttggcagctaccggggctttgccatgtccgtctcctttgacgcttttcacaaggagtataccctccagctgaaagggcagatgacccaccgcaccgccctcggcacagacccgcgcggcaacctcacccgcattgacaacgccctcgcccagatgccccagcggttggagaatgtgaaagcccagctggataacctctaccagcagcaagccgccgcaaaggaggaagcgggcaaaccgttcccccatgaggaagaactgcgggtgaaatccgcccggctggtggaactggatatgcagctgaacctgggcggcagggcgcaggcccagccggaggcggcgattgccaaacgcgaaaagccctcggtgctggccggcttaaagcgcccagtgccgccccgaagcagcgaaaagaaacccaaacaacaggaaatggaggcaagataacatgaataccaacgaactgaatacggccctttatgagaagatggctgcggagcaggagcagtaccgggactggctgaaaggcctgctcccggaggaaatcctgaaccatgcttacgaatacaccgtccgggaggacattttgatggagatggcggaactggaactgcccccggagcaggcggaggccctgcttgcctctccctccccgctggccgatgtactccgctattttgacaaattggaaaccggccacatggacctgatccgggacagcatcgaggggcgggccaatgatgtgacgatgcagaaaatacagcggcgagccgccttgctggaccatgcgaaaacgctgatcgacaatttctgccagggcgaatatggttcccgcacagacttcagcgaccttacggcagtcgggatcgcctacaccaccctggcggacgatgaaatcccgattcaggtcaacgtggacttggagcattaccgcattgaccgctttctggacgacacgcctttggagagctggcagtatgattccctcgattccttggtaaacgacgagttggaaaatctggactttaatgatctgatctttgtgaccgggcaggagttggaatccgtccagcgcccggaaccggaaaagccggaggccgtaccgctctatccccatactgccgattatgccagagaacatggagaactggaccagtaccgggcctctaaccgggcgaatgttcaatgtaaggaggccattgaagcggcggtgcgggaacattttgacggaatgcacctcagccatgacgcggccagcggcgtgatccagacctatgggctggagcgcgtgatgcacgttttagccaacactgtccagctgcacggctgggacaacaggtattcccgccgcaataaggaatgggcggatactatccccaaccataattctgattcggctcgcctgagctatgccctcatcagccaccctgctgtgctgaacggtatgatcgacctggtgcgggaggaataccagcgcagccgcgcggcggaggaaaaaccgaaacagcgcgcttcggtgcgggaaaaactcaaacaggaaccgcctgcaagaaagcccgccacccagaaaaagcgggagcaggaacgatgagcgccccgaaccgcaaacgggaggtccaggtgaatttccgggtttcgccggaggaactggcgctgatcgagcagaaaatggcccagcttgggaccgccaaccgggaagcctatctgcggaaaatggcgctggacggttatgtggtgaagctggacttgccggaactgaaagaattagtgtccctcctgcgccggagcagcaataacttaaaccagctgacccgccgggtgcatgaaaccgggcgggtttacgacgctgatttggaggatttatcccagcggcaggaacagctatgggagggtgtgaaagagatactgacccagctttccaaactttcgtaaagggagataaaccccatctgggccgggaggatcggcgttcttcgccgcgccttccggccctttttcttttttgggcgctcaaacaaacaggacattggaaattccaatgccctgtctgctattcaatctcataatcctcgctatcatctgcctcgcccgttgtgcaggtaaagcagagacagctcccggtgatggcgctccccgccgcccagatcggcgcgccgcagatcatgcactttgcgccgtttttcttggcagacagcatttcttgaagcgcgcttaccagttcttttttctgatagcccgtattgttctccatgaccatacgggcaaatttttcgatggaaatgggctgcatcattgatgtgacctccttgcctgcacacatttcagcttttatttagaagtaagccggtcatactggataaccgtttcgccagtgacaagatttgtcttttccttatagagcatcgtgtagcgagcctgtccctccgtataatctttcgtctctttcgggaaaaaagaacggcaaaagtatcttccggtttctttgtgttctgctatgaaaatataaatatcggtgttttccaaaggcgtcgatagcagataatccgcttctatcaaagaaaactggttcagcttggcattgtagcggaacaccaaactgttatcgtccaaaagctgctcgatgaaggacagcggttcaaaccgattctcaatttgggaaagatagcggctgtctgataaagtttcacaggttatccctccgctgatgatctcatcaaataccagcccacggttttgctttgcgatccgtaagtctttgagctttcccagtcccatcaaatgatggaagtccagcttggaaaaaccgatgaccagttctgccgtttttcctttccggccaatgatgatccggtactgaatctccaacaatttttcaaatgcttttgcacacttttgtaatctgtccataatacctctctatgtaaaaggaaagccgccctgcaacgcaaggcggctttgagcattttctttcggctttgcagcctactccggtttgaggttactgcacaacccctactgaaagctctgcataacaaggcattccggtacgctattatgcttcaacgctttgacagacacacgccgttgcctgccttgtactattattatacgcaggaaatcaaaatatgtcaatgcctacattgaaaatgaaaagtctatccatggaagggaggcttcaccatggcgaccacgcgcatcatgccgctgcacatcggcaagggccgcaccttcgggcaggccatcagcgacatcattgactatgcggagaacccgcaaaagacggacaacggcagactgattaccggatttgcctgtgacagccgcaccgccgacgccgagttcctcttggcaaaacgggaatacaccgctaccaccgggcgggtgcgcggcgcggacgatgtgatcgcctatcacgtccggcaatccttcaagcccggcgagatcaccccggaggaagccaaccggctgggcgtggagtttgccaaacgcttcaccaaaagtaaccacgcttttgtggtctgtactcacatcgacaaatctcatgtccataatcacatcatctggtcggcggtcaatctggactgtgaccggaagtttcggaacttctggggcagcacccgcgcggtccggcagctgagtgataccctctgcatcgagaacggctattccattgtggccgacccgaaagcgcatgggaaaagctataacaagtggctgggcgatcaggccaaaccctcccatcgggagcagctgcggcagatgatcgaccgggccttggagcagaaacccgccggcttcgaggaactgttaaaactgctggccgagatgggctgcgaagtctcccggcgcggcaaggcgctccggctgaaagcccccggctggaaaaacgtggcccgtatggacgagaggcttggcgaagggtacagcgagacagaaatccgggcggtgctggctggggagaaaacccacacgccccgcaagaaaaatatccttccggcagatccgccgaaggtcaatctgttggtggatattcaggcgaaactgcaagctgggaagggcgctggctatgcgcgctgggcaaaagtgtttaacctcaaacagatggcgcagacggtcaattatctcactgaacatggcctgctggaatacgccatgttggaggaaaaagctgcggcggcaacggcccgtcacaatgaactttcggcgcagatcaaggcggcggaaacccgcatggcggagatcgccgtcctgcggacgcacatcgtaaactacgccaaaacccgcgaggtctatgtggcctatcgcaaagccggttactcgaaaaaattccgggaggaacacgaggcggaaatcctgctccatcaggctgcgaaaaatgcttttgaagatttgggtgtgaaaaagctgcccaccatcaagagcttgcaggccgagtatgcccagctgttggagggcaagaaaaaagcctatgcggagtaccgccgcgcccgcgaggaaatgcgggaactgttgaccgcgaaagccaatgtggaccggttgatgggctacgaacaggagcgccagcatgaccggaaaccggaacaaaatcaggaccgctgacctgccggttttctcccgttctctcagcgccgcaggcagtgaaaagcgttccgcaggaacgcgcagccacagaatgaaattctgtgttcaaaaggggcttggggaactccccaacaagcagcgcaagggagccgtggctatccttgtgcatcgcttgccgctttcttcgtcagcccatttcccgtatgattcccccgtcctttggtacaataagcccatacaggaggatttgccaaatggacaactacaacaacccacgaagattagaaaatgaaaccattcgccgctacctcgaccacctgcgggagcaggagcgcgcaggccagacggtgcaaaaatacgcccgcgacctctcggcgctggcggcgttcctgccggggcgaaagcttacaaaaaatgccctcatcgcctggaaggaacaccttgccgcgcgctatgccgccacgtcggtcaacaccatgctggcctcgctgaacggcctgctggccttcatgggctggcacgacttgaaggtgaaaccgctgaaaatccagcggcaaattttctgcgccgcagacaaggagctgacccgcgccgaatatctccgcttggtggaggccgcgaagcagaaaggcaacgaacgtctttccctgatgctccaaacgatctgcgcgacgggaatccgggtgagcgaactcaaatggatcactgccgaggcggttgccagcggccacgcgcaggtggcttgcaagggcaagcggcgcaccgtttttctgccggagcagctgcggacagtgctgagaaaatatctgaaaacgcaaaaaagagcggcggggccggtgttcataacgaaaaccggaaagcccatagaccgttccaacatctggcgggatatgaaggcgctgtgcgagagcgcaaacgtggagccgggcaaggtgttcccccacaacctgcgccacctgttcgcccggacgtactactcgctggaaaaagacctctcccgactggcggacattttgggccactccaacgtgagcacgacgcggatttacacgatggagagcggcggcgttcacgcaaagcagcttggacgcatgaaactggttgtaacaacgtaagattcgttacgttgtagctcgtctgaattttaagattaaatacatagccattatacagcgaagccgcctctaaaagcaagcgttttacaaaattctggcgcagaaaactgtaaaacaggcacgaaaaacagaccggaaaaccccttgttttttcccggcctgattttgtgcgctcttttttcaattttgcaggaggacagttgccaattcgacaaattttacggtataataggcattatggagcagtatgccattctcaaagctacaacgtaacgaatcttacgttgtggctttttttgttccccgcctgaccacattacgaatcttatgtggtcaggtttgttttttagaaacggaggaacaggaaaatgcaggtgcaaagaaaacgaattgccgcgctgctgatggcgggcgcgatgctgttcaccaccctgccggtgaacgcgctggcggtggaaaatccagatacgggcgggctgtgcaaacaccacccggaacatacgtcggactgcggctacaccgagggtatggcgggtgcgccctgccagcatgaacacgatgaaaattgctatgcccttgtgaccgaatgcgttcacgaacatgggccggagtgctacccgcaggaggacgtgtccggtgatgtggccacccctcccgacgcggacaaggccgagccggtctgcggccatgtttgcagcgaggaaagcggctgcattgtagaacaattagactgccagcatgagcataccgactgcggctacaccgaaacagtgccgggaacgccctgcatcttcgtgtgcaaggagtgtaacgccgaaactggcgagcaggaagatgagtgcatttgtgatgcgccctgcacccagcaaacggtcaacgccgactgcccggtttgcggcgcggacggtgccgatctgaccgcctgcgggggtaaagcggagcagcctcagcagatcaccatcaccagctttgacccgctggacgaggacgtagcgaagcaggttgttaccactggcgaaagtttgaacctgcccgacacgctgggcgcgtccgggtatgcgggaacccaagacagcggcggcgcggaacacctgaccattgagggcgtgacctgggaacccgaccggccttatgacgagaacgcggagcagggcgcgtggctgtttacggcggtcttgccggaggaaggatatatcctgctggacggcgtggagctgccggagatttcggtgatggcggagccggtgaatttgttggctgatactgttgtggtcgattatcttgattgcgatgaaaacggaaagaactggactaccaaacaagcaaacgccacattgcttgatagctatataacttctttgggggcagatgacagtgcagagcattggtatgttgttaggggcaacgtcaatttctccgacaacatcactgttaccggggacgttcacctgattttggaggacgactgccacctgactgcgggaaagggcattaccgtgtatgatgacgacaaaagtttagataccgaaagccttaataagctgacgatttatgcccaatctgaagggggaaaaacaggaaaactgacagcgaagggctatctctatggagcaggcatcggcggggcttccaacgatggtgggaagggatattgtggtgaagtcacgatcaatggtggcattatcaacgcaacaggcggcaacgcaaactggggtggtggtgcaggtattgggggcggtgggagcgaggtcgagcgtggacatggcggcaatgttaccatcaacggcggcgtcgttacagcaatgggcggcatagacaaaaaaaacggcgggaatagcggagccgcgggcattggcggggcctccaattgcggaggaggtaacaccaccatctgcggcggcacagttacggccattggagagaaaaacggtgcaggcattggcggtagtgctggtggttcggccggtactttctctaccggcgtcaacggaaatgcggtgatctttgccaacagcatttccgaccaaagcggaaaaagtggtggcaactggaaaggcgtcatttttgagggtgataacggtcaggtctatggcgaagtcacccgcaccgaggactttgagatcccggagaatacaatcctcactattccaaatggaaatgaactttggctaacaaatgacattaccatgacgaaccgggggacaatcaaggtagaaaatggcctgctaaattatgagaatggtattatcaataattttgggactattgaaggcaataccatcactcctgataacaaaaattggaataacaagaaatctaaaataaactttatatcgcctaactccgcagaatatggcagtaactatgaccttaccgtagaagtcagtggcgaaaatacaaatagcctgttcagaactactccaaagaaaacagtttatttttatcgtggggatacgatgattggaagcgcggtggtagatgatgctaccaaacaagcaaccctttccataaaattagagggtgcagattggaaactgggtcagtatcaactgaaagctacctataccggcagcaacgatcagctgttgccctcggaaaccacctccaattttacgcttacagtcaatccggggcaaattaaagaaggcatggtgcattggccgcaatcaaatccgttcacctatgatggcaaagatcataagtccgatgtcagcgtagacggtctgacactgggcacagattacaccatcagctgtacccgcaatgagcagactggcgacaacttcaaagatgccggaaaggtgactgtgaccgttcagggtacaaacaactatactgggacagtgaaggaaaccttcaccatcaacccggctgacctgaccattaccaatgttacccttgaggcgaaaacctacgatggcaataaaacgggtacagtgcaaagtgtaacgtttgacggcttgaaagatagtgacacgctgacctccggcaccgattacactgccaaagcggagtttgatgatcccaatgttgggaatggaaaaaccgccacagtgaccatcacgctgaacgatacaacagtggcaaagaattacacggtgacaaacaccccctttaaccttacgggcctgaccatcaacaaaggccccgcacctgccgccccgactgtgactggcagctatgcggtcagcagcaccgatccaaacaagttcgtctacacggtgaacacaatcccaggcgcggagtattccaaagataattttgcatggcaggacagcaacgagtttgatgagattgaaccgagcagccaaatcacattctatgcccgcatcaaagaaacggacaatgtgaacgctgggatcgcgggaaacactggcgaagtggcattcaacaagctgccaaacaatgaaaagccccctctttctgtttctgtgactggcgaaaacggcaaccgcaccattactatcagcccgatagagggagcggagtacagctttgacggaggccaaagctacaacgctctcaatatgaaaacaggctgctccggtactgtcaatgtggcaatccgctacgcggcaacggctacgctgaacgagtcccagccaactgaaaaagaagtaaatacgaataagcaggagcaaacaggctttgagatttcttctcctggcaccaagacctacggggacgccgcgtttgcgctgtctgccacaggcggcagcggaacaggcggcgtaacctttaagagcagcgacgaaagtattttgagcatttccggcgcgaccgctaccatcaaaaaggcgggggatgtcacgattaccgcgataaaagcggcggataacgactacaacaaagctgaggacacccttttgctgtccattgacaggcgggcagttacagtcacagcagacagcttcaccgttgtaaccggcgcggctctgccgaccctgacctatcagatcaccttcggctcgctggcgggtacagaccgctttaccaccgatccaaccctgtccacagtgacagacacgaacaccgttggcaagcatgacattaccatcagcggcggtacgctggacaattcggacagctatgatgtcacttatgtgaacggcaaactgactgtaacggacaaaaccccggtgcaattaaccctgacagcgaatcccgccaccctctccggcggcggcgcggtgacgctcaccctgaccgggcttccggcaggcggaacggcagccgtaagctgctcggacagcagcatcactgtaagcggcagcgggacaagctggaaagccaccctgcccaacgcaacagcggcgtacacctttaccgcaaattacagcggcgatgcccagcataccagcgccgaggcaacctgtacggtcagcgtgacaaagcgcaccagcggcggcggctcgtcctctggcggcagcggcggcagctctaccatcacagaccgcccggacaagaacgacccggacagccccaccaccggccagacggagccggtcaagccggacaagggtggaaacgtgaccattaacggcggcgatgtgcaggacgccatcaacaaggccaccgccgacgcaaagaaaaacggcaaccagaaaagtggcattgctgtcaccgtcccagtgaacaacacggcggacgtggagggcctgaccatcaccattccggcggcaacgctggacaagctggtaacggcaaaggtgcggcggtttgacatcaccacaaacggcctgccttgcttcagcttcaccctggacaccctgaaaatgctggacaggcagtcccagggcggcgatctgatcctgcggctgaccaaaacggcggtcacgtccgccgaggcgaaagccgccatcggcgcccgccccgcctatgacattacccttgtgtgggtgaaaaatggcaaggaaacacccctcaccgactggcagggccagaccatttcggtcaagctgccctataccccggcaaagggcgaacaggccggaaacctctacgcggtttcggtggacgctgctggcaaggtggagtggctgaccaaatccagctacgatgcagaccagaaagcggtgctctttgaggccagccatttcagcgtctacggcgtgggctacaaactcccggccccggtattcaacgacatttctggccactgggcggaggaacacattttgttcgttgccagcagggggttgctcaacggcacaggcaacaatctgttcagccccaacaccggcatgacgcggggaatgttcgtcaccgccctggggcgactggcgggcattgacccggaacgctaccagagcgggaggtttactgacgtagccgccagcgcctattatgcgccctacgtcaactgggcggcgcagacggggatcgtcaatggcaccagcgccaccaccttctcgccggataccaacgtgacccgcgaacagatggcggtgatgatggcaaactacgcggacaagctgggctatgacctccccgccaccctggaggccgtgaccttcgcggacgatgggaagatcagcacttggtcggcagaagcagtcaaagccatgcagcaggccgggattctggcaggcaaggacggaggccgctttgacccgcagggaacggccacgagagccgaggtcgccaccgtcctccaccgcttcgtggagatcgtcattgacccgcaggcggccaacggctggacggaaaacgccagcggcacccgcagctactacaagggcggcaagcccgccaccggctggctgcacgacgagaagtggtattggctgcaaaacggcggtatccccttcgccggaggctggaaacagatcggcggcaagtggtactttttcaatccagatggcacgatggcggtcaacaccaccatcgacggttatcagatcggcccggatggggccagaaaataagcaaggaaggagtcgcgtcagctttggaaatgtgcgaaaccatacaaccgaataccgttatgaggtaatcaggtgccgcaatcccggctgacccataccttctttgtcgcatggcggtaactttatggaggccgcctatgcgtaaatgtcccttttgatttacctccgcccgcaggcggcggaggcgcgaaaaaccgcataacgtgtcccttgagggcgcagatgatattgcaatcatctgcgccctctttttatctcccctttttcggcaaaaagaagggaagttctggtaaacaagacaggaaacgcacagcgcaggatcggagaaaggacaaacctccccctgccctgcgctttttctacatattcaaccaacggagcggtttcttcggccctggctgccgctccccgcctccattcgattcacccgtcaaccacgcttgaatcgaaatggaggtcattatgaaagaactcaacctgcggatcgcgtatccgaacctgtatcaagttgatacgtttgtagaagtaaccgaggaagtgctggaagtctttcgggcttttgaacgtgccgaagccgcccacgagcgcaagctgtaccggtacaaggcgcagtattccctggactatgacaacggcatagagaacacggtttcactgcacccgtccacaccggaggaacttttggaggcaaagcagctgcgggaacagctttactccgctgtgatggccctgccggagaagcaggcaaagcgcatctatgcccggttttaccttggcatgaccgtaaaggagatcgctcaggccgagggcgtagaccctcgccgggtgcgtgacagtatccagaaaggcttgaaaaaattatcggaaaaattttaatttcttcctcaactgagcgtccgtttcctgctgtttttgtcagtgttattagagggagatattttcagatccctcctttgcagcttgacaagtgaatatacggcataacaggtacataacccgtatcgaagcggatagggcgcgccgccaggacgattgcttgcaggaggtgatgcaggacaggcaatccgagcgatctacgccagccctaaccccggaggcggcacttcgggcgcgatgatggtacgggggcttaaagatacttcttcacagcccgccatagacttggggggaaccctgcggcgcacgagcaaaacggcgctgcggagttatgacagctccgcccggagcggcctgttatgtccccatcgtcaggggcgcgtggcaaatgtggcgaaccattcaatcaacataccagcagccggatcacattgtcggtccggctgctttcaacgaacatagaaccctgtttttataggaggtgcgtctttatgagcaaacagaaaaccccggcaacctcttaccgggaggtgcggatcgggaaaaccatttaccgtgtcaccagcttcttttcgggagaaaaggacctgggcaagacgctggaacagctggcggtcaggcgcgccatgtcggaaatcgttccagccgccagcggttccaaataacaaccaacctcgcggccagccgtatgcttgcgcggcgatggattctccggtaagatattcatgcagggtacacctgcggagccattttgccgcacgaggtatggattcggatatggtcgggaggttaaacaaagatgatggaaacgacatacaacgtgggcatctactgccgtttgagcaacgatgatgagcgtgacggggaatccgtcagcatcgaaaaccaaaagctgctgcttcagaactatgtgcgtcagcgaggctggaatgaggttgacacctatatcgacgatgggtattcaggtacgaatttcaaccgtcctggggtcaagcggctgatcgaggacgcaaaggcaaagcggatcaacgtgatcctggtcaaagacctgtcccgctttggccgcaactacatcgagttcgggcagtacacagattatctgttcccgtcgctggggtgccggttcatcgccttgaacaacggcatcgacactatgagcgacaacggaagcaccgacgttatgtgctttttgaacttatttaacgaattttacagccgggacaccagcaagaaggtcaaggcggtcaagaaagcctgcgccgagagcggcaagtttatgggaacctatcccgcctacggctaccggcgcgacccgctggataagcaccatcttgtgatcgacgaggaaaccgcgcccattgtgcgccgtatctttgcgatgcgggcctccggtatggggttccatgcgattgcggcggcgctcaatgaggaagggataccctcccccggcgtgctgtactaccagcgcaagggccagagcgacccccgccgggtcaaccacaagtgggccgaccagacggtgaaaaacatggtccgcagcgaggtctacatcgggaacatggtgcagggcaaatacggcaccctctcctataaatcccgcaagctggtcagcaaatcggaggatcagtggattcgggtggaggggacccacgaggccattatttcgcaggaattgtgggataccgttgtgagcatcgaccagaagaaggtgcggaagaacacccccgccgatggctgcaagagcatcttcaccggccttgtcttctgcgccgattgcggcttcaaaatgcggaaccagatcgagcgcttcacctataaggacggcaggccggggcggtacagctcctttatctgtggcaactattcccgcagcggcaggagcgcgtgtaccattcacaccatctatgagacggtgctgcaccagctggtgttggaggacattcgggaaaaagcccggtttgcggaggtggacccggacagcctgattgagcagatcacccggctgaaagagaaggaatcccacacccgcctgttttcctatgagcaggaattgaaaaccgcgcggacgcggatttccgagctggaacgcctgatgcagaatctctatgaggacaaatgcaccggcgcgatcccccagacggtattccagacccttatgcagaagtatgaagcggagcgcgcggaaaaggcagaggcggtccccggcctggaacggaaggtgaaagcccatctggaaaaccgggtggacgccggccgctggctggacctgatccggcgctacaccgaactctcggagctggacgaaaccattctgtttgaactggtggaccggatcgaggttggcgaggcccagaagatcaacggccagcgcgtctgcgacatcaaggtgcattaccgctatgtgggatatgtggatacggcgctggcgcaggaagggaggcaggactatgacgaagcaatataaggtgggcatctactgccgcctgagcgtcgatgacgcctccaattccgcgaaggcgaagcactacattcccagcgaggaatcggtgagcatcgagaaccagtacgaaatcctctccaaattcgccatgctcaacggctggatcgaggtaaaaacctatcgggacgatgggtacagcgggggaaattttcagcggccaggatttttggagatgctggaggacgcaaggcatggcctgattaacctgattctggtgaaggacctctcccgcctggggcgcgatttcgtggaggtgggccggtacacagacgttgtttttccctcgttggggtgccggttcgtttcggtgctggactgcctggacagcgagggcgacaacaccgatatgctgcacttccgcagcctgatgaacgactaccacctcaaagacctgtccagtaaaattaagtcggtccttcacgccaaaaagaaaagcggccaatacgttgccgcttacgccccttacggctaccgcaagagcgaggaagataagcacaggctggtgctggacgaggaagccgccgccgttgtgcgggagatctaccagatgcgctgttccggtatggcctatgggaaaatcgccgccgccctcaacgagagagggattctccctcccagctggcattgggcggttcactacggcaagggcagcagcaaccgctccaaactgtgggcctatgcgacaatccgctgccttctgaacgatgacatttacctcggcaccctcacccagaactgcaccggttcccggtcctacaaggacaagaccacgatacggaaaccggaatcggagtggatttcccacgaaaatgcgcacgaggccattatccagccggagctgtgggaggcggtgcaggaaatcaaccgggcggcgaaacagcgcgccgatggccgcacaccaccccagcccgctttgttcaccggcaagctggtctgcgcggactgcggacacccgatggttgtcaaccgacaatcccagcgccggaagaacggcactgtcaagcgatatgtctcctacttctgctcccggtttggcaccactggacacagcacttgctcctggcaccgggtttccgagatcacattgaaaaacatcgttttgaacgaaatccgggcgtatgggaaagcggtggcgaccgatgaagcggcggtactggaccggctgaaacagcagatacagtccgcgaatacttcccagcaggaggactgccgccaggagatcagccgtctgcggcggcgcttggaggaactggaactgatgaccgcgaagctctacgaggataaggtcggcgggacgatcagtgaagcctccttcgccctcctgattgaaaagagcgagcaggaacgtatccagaaagcggaacgcttggacactctgctggctggggagcgaaaatctcagcaggacatcgccaatatccaacagtgggctggaactgtccggcagtatctcgacttgcaggacctcagccgggacattgtggaggaactgatcgaccacatcgagatcggagaacggacagtcatagacggacagaagcatcaggacatcaaaatttattaccgctttgttgggctggtgtgatagggcgaaaaaacgcctgaccgcatcagcagccagacggaaacattctattttagcagcgatatgcgatggttacgcgctgttttgtcgaataaattggaagttggtagaacccctctcgcagatagcttatgttcttaaagatattccgcagcggggcaaagtcattgtcgccttgtgcgctgtccactccgtcattgatagcgataaagcggacacctttctgtgggaaaatcatttccgtgtacattcccacttgcaggtagtttcgccctaacctcgacatatcctttacgataactgtcccgacttttccggcttcaatgtccgcaagcatggcttgaaaaccgggtctttgaaagttcgcaccagaataaccgtcgtccgtgtaccagcgcagattggaaaaaccgttctgctttgcataggtttcaagaatacgcttctggttggaaatggaattgctctcgccttgcagctcgtcctcatgggaaagtcttgggtaaagggcggtaattggttgttggttggtctgtcttaacataaaatcctccgtttccgacagccagccccactattccgtaccttgattgtaccacatggggcggcggtctgtatagcggcaaaagcgtcaaatctgcttctttatggtcggtcaaatcgccgttttttgtgtagcagcttccgcttccagcactttcatcatcttgtcggctgcggtatcggttgcgccctgcttgaagaagccggaaacggtaaggacggagttgcccatgcggatttccgttacacagtccgggcggcggtctgttttggtggtgcttgtctgtttcgtttctgtcataggctctcctttcgctgcttcatcagttgctttaagcgttccagcttttcctgtgcggtttcctttcggaagttgctgcccgtgaagcggacgggggcgcacatggaagtcagcctgtcatagatacgggcgtggggcgtgtcctgcgggtgctgcaattcctccagcgtgaggttggtcgtggcgatcagcggcttgtcgcttcggtaacggctgtcaatcacgctgtaaacctgttccagcccgtattctgttcctcgctccataccaaaatcatcaagtatcagcagggggtagctgcaaaggcgggaaatatattcgttcctgccatcaaagctggcagcaaggtcattgagtatggttgcaaagtttgtcatacagacggcaacctctttctccataagggcgttggcgatacaggcggcaaggtagctttttcctgtccccacgccgccccaaaacaggtagccgatattttcagcctgcatggtttcccagctctccacataaaagcgggcggtttcggtctgcgggtttctgccgttgtcatgctcaaatgtccagttccgcatagcagggtcggtaaagccccggcgtttcaagtcctccactttttcaaggtgcttctgtcggctttcggcggcttgctgcttttcacgggctgcccgctggcagtcgcagtctgtcgggtggcggtcacgcccgaaacaggtctttccctctgcaaagtaggcttctttgggcgtatggcacttgccgcagtataaaagcccgtcctcgcctgtgtagtcctccgcttcggcggtagtggctgtaatgtccgtaatcatagcttcaatctcgtttttcataagctctcgccctccttgcatgaataatcgggtataccctgtttcggggcagccttgcctttggcagcgtcttcctgcgcccacttgtaaatggtggctgcatggctgtggtactgcttcccagtggaagcgatatggcaggaaagccggtcaatataatactcccacttgtcgggcagctctgttttcagcccggaaagctctgtatcggtcagtatcacattgttgtatctgccataagcggcgggggcggggtgtcccgtttctccctctctctctttttctatctctatctctttctctaactctatctctttctctggtggacgaatgtcggacaaatgtccgccttttgtccggggcggtaaaagtgccttgttttccagccttgcagcccgttttcgctcggcttcggtagaggactgtcctatcatcaactcaatgtcggtcatatagaaagccccgctgtcaagctgctccacaagccccaactgccggaaaatctccaaagccctctcaaccgttcctatctggtggcgggtcagtgtcgctatcatctgcgctgtgtaggggatatgctcgtcaagctgcaatttcccgccgtttttcagcgattttaagtacagcttcaagaggatattggagtataaaatcccgtctttcatatcttccagcagcacaatggagtcgctgtcaaaaaagttctctttcagcttgaggtaataatatttgcggttatctgccattgtccctgtcctcctttttccggcgtttggagtagtagtgggggcagagtatgataatcgcccggaagctctgcttgcagctatgggtacagccccggcagaggtcattgtatgtgatacggtcgcaggtggaattcccgactttcacttgccgcaggaaaaaagaccattccagccgccgtttcttgctcattcttggcatgggtgcgctcctttctgccgtttccgctggtgtggcggtatcggcggtaattctgtatcatctcggtatcattttcggggtttttctgccctataagcccgttaaaaaatcctttggtatttgcggatagggtacggggcagcccccttgttctgtataggttcgggtacattttggggcggtttttatcgttcctgttcctgccttttcacaggcttgcgctcccggtgtaaaatctggtcgatattgcccttgacagtctgtaagcggcggtattcctcccgttttgcccggtaatcgttgtagccgctgtttttctcttggataagggtttcaatctctgcttgcagggctttatagctcggcagcttggaaatgccgttctccctgaaatagcgggcggctgcgtctgctatgataaagtcgctttcgtacttctgacggtaggctgcttttgctttggcgtttttctgctgtttcagcccgtcccggacagggcgggtcttggaataggcaagcacctgtcgttgcagctcctttttcccgttcagcgtcttttccacctgcttcagctctgcaaggctttcctgcatggcggcataggcggcagaacaggcttcgtccagttcctccggggaagaaaagccgtactgctggtaggcagtaacggtagccgccatctgctttaggttgtgctttgccgcccagcggtcataacccacgcccttgccctcggctcgcttggcttcccggtcaaccatgcgctgcaagatgttgtctgccggggtggtttttgcggctttttcctcctgcaagcgtcccttttgggtgtgtgggtattccggtatggctttggtctgttcggcggctctgtgggcgttctgcgtaagcagggcaaggacagcaaccttgtcaaaatcgtcccccagcttccgggctgtgataggcttcgtcctgtccggcgtgaggtaggaaagccgcccccggctctccttgacggtcacaccctcctgcagcaaaagggaagaaaactcgtcaaagctggcagcttgggaaagtgcctgccgtatcgtccggcgcagcttcgccttgtccgtttcaaacttggtgggcttggtcggctgtcctgcggcttctctggcggcgttctctttatcaagggcaagctgccctttctttgccgcccagtattcccgttcggttatccgttccttgctgccgttcaagaggtcgatttggtaaagcccctcccggtggcacatctccatgacttcactcttgaaatattccatagcggcattggtgcagcggtgcttgcagccctcccgtgtatcggctggtctgtccatgtagggcagaagcgggacttcataaatccgcagggagttgatgacgatatgcacatggatattgccgctgtggttatgcccgtccgggtgggtgcatacaagggcttggtgtccggggaaatgctctttgcagaactgctcgcccagctcctgtgcccggtctacggtcaagccgttgtctgtcccgtcccgtgggtcaaagctgatgatatagtggtggcttttcacatcttcccgtttttggtttttctcatagcggagattggctcgcatacaggcaacggcgaaatcctcgcccccgcagttaagggaagaaatgcggtaatcctccctcggtatcagccgcccgttttcatcaagggtgggcttcatggtaaactcgtcatgctcaaatgtgaggtaggcttccgctgcgccatagtcggcatttttagagctgatatgtttgaatgttgccaacagcgtcacccactttctgcaagacttcaaactttagggcagcaaggtcggaaaccgccgcccgtacctccccggcaagttgcgggtaggggctgtgccactcgttcagtgtccgggctatctggtttaagttgccgccgatcctgccgtattcggcggtcagcttcccgacagcggcaagcagctcgtcgttgacgggggaaacagttatgatggggcgtatggctgccccggttatggcttgccggataaactcggcttggctcatgttgtaggcagaaagcctttccgcaaactcggcgtattcttcctcggtcatgcgggtcttgactacccggctgcggtgcggcgtgttatatcgttttcgcatggtaaaaacctcctttcggctgtgcgtggtgtcctctcactaataggagaaaaacagggtgtgaagcggaactgtttttgaaaaatccgaaaaaatattttgagggatttttaagcggcgtaagccgcattagcagggtttggggaaggcactccccaacaagattcccgcaggggcaaaatgagcgaaaagcgaattttggtactgcggtagaatcttgctctgaaaaactccggcgttccccggctcctgtcctttccgctaacaagactgtgcaagagggcatttctgcccgctctttcggcatatctcgaaacttttcctgttcactacctacaacaccacgtaagccggaaaaggcggacaatggcagtattttttctttgataccctccacggataggaaaaggattttgccaaccgcggcggctattttcccctttgctttttcatactggggattttcaaaaacgccaaacgggaacgaaaaaaagcagcaaatccgttgaatagatttactgctttctggttgccggcgaagcggcggttattcagttgtaggcggtggagctatctcccaaagcggaacttgaaaatggctgcaagaagcgtctgggtgatgtagtcctcggtgtcttggtctacccgtccattcacacgggcggcgcattgtattcggcggctgtaatactgcaacacggttcccaccgcttccggctccccgctgacggcttggatgattgtttcataggggagaagcctgttattcctcatgcgccattccctccatttccgcttggagctgccgcagggcttttcggatatgatagcccgctgtgctgcggctgcgcccgtactgtctgccaatttcgtgctgtggaatacgcttgaaaaaggacaggtaaatcatttcccgctcccgttcgtccagccgtgacagggcttccgcaagtaagccgctgctgaaaatgacggtatctctgcaaagggtaagtatgtattcctcgtccggctccggggcttggaaatattcatctgtcgtgcctaaagggtagtgcttttcatctgtgaggtattcaagggatatttctcttttgtgcttcctgctccgtgtcctcgctgcgttgatcgttgcatttcggataacgactttgcaaaaggcatggaaagtgtactcgatatgttcccgatattcttctgtacaggtcatggaaaatccccctttcctcccaaaaggtctgtggctggttagtagttgctttttatgatcgtaaggggcggcagcactttaggctgtcgctccttgactgcctaactgcaaaaccgggcggggctgtcaacggcgggcgaagcccgttcatcttgaccgttgactggctcggccgggtttgctatttacccgacaaacttgaatttattttaagctatcacgttttacctttttaagccttactatcattaccataggaatttctttgttgtttttgaaacattcttcataaaatccatcaatgacaaatccagctctaaaacaaaggttaaaaatatcttgtatggaacgatgataataaatctgctcctccggttgcccttcaatcgctataccatagtaactgtgcggtgtcatatatttttcagtcaacgtgataaaacaagggtgttgcgttgcaaagacaaaaattccgctttcctccaacagttcataaacagccataagaagtggttcaatatccgtaatatccataattgccatattagaaactgctttcgtaaaggctcgatttctttttaattctaatatattttctctattggtcgcatccgctacacaaaattcaatttgttttgcatattgtgattgccgtcttttagccaattctatcatttttttgctgtaatcaaaagcgacaatcgaagcgcctctttgtgcaagatacgaagaataatttccattgccacacgcaatatccaaaatataatccgcaggattaggagatagaagttccgttactttgggacgcactacctctctgtgaaattcattagatttgtcacccattgcattatcccaaaattgtgcgtttttctcccagatttttttactttcctctgttcccatgttctctccccctcccaaaatttgcctttttgcttccattaaatcttccttactatattccattgttaccctccataacttctgattgttgccgtcttgactattatgtatcttttctttccaaaatggtataggcttttatttttgtaatgctgcaaaacttttcttctgtaaggtattcaaaggatatttccctttgccgccgcttgcattaagccgccgctattggaaagccaaaagcagcggcttttttacgcgatatgaccgaaaagtctagaaagcaggatatgtcatcatttgtcatttcttctcaatgtaataactgcatggcatatcaagccaaatacaagagaaaaacagccactgccaaatagtgatgctccccaccctgcacccgacattgtcataaaaccgtcaacaaagaaaataccaatgccaagaaatatcccgacaccataaaaaagtccaattgccatatcatacttattaaattgtcgtttctcttttttttcacatgtttccatttttgttattacctccttcacaaaatcgtccatgtggactccaaaaagaaaacaaatttttttcaacgtatttaaatcgggttcattaacatctctctcccaattcgatagcgcctgccgggtaacattcaattccccagccagttcttcctgtgtcattcccgattgtgttcgcagatgacgtatttgctttcctgttgtaatatccgtctgtttctggttcaaaatagttcctcctctctgatgctgattttatcaatgatatttcgcaatagccagcaatgaacgcttgcattgcgcaagacgttacattatcttctgaaacatatgccggatcttgtctaaacggctgttcgggcggcgtggctgaaacacaggctcgccggaagtttcctgatacccttttaattctgtaatgcagacacttcttccatttgtataaaaattcaaatcatttctatattcaccgatacaacgggcagggatttcccccttaaaaataacttcatctttttcaagtctggttgattcaattattgcgcaatactttggtgcgtcattataagcccgtgaaagatattcctgcggtgcaaaaagggtaaaggaaaggtatggttccaacagttgtgtccctgcttttttcaatgcctgctccaacacgacaggcgcaagaaaacgaaaatcagcgggggtgctgaccgggctgtaataaactccataatcaaaacaaatttggcagtctgtcactccccagccatataagccctgctccattccataacgcacaccctccatgacggcattttgaaaactttggtttaaatagccgagagatacctcgcttttatattgtgttccgcttccaacaggaagcggtgttacagtcaaaccaatagatgcccaaaacggattcggcggcacttcaatatgaatcgtgcagctcgcttttttttgcggtctttccagataaataaccgaaggctctttcatagccacgcccacatgatatttttcttctaatagcgaacaaataacttctaactgtacttttcccaaaaaagataacataatctcatgtgtaacagtatcaatgtcaaaatgcaaaagagggtctgtatcagcaatctctgcgagggcatttaacagggcttccctttgctccggcttttgcggctctaccgttgtccgaagtaatggcatgggattatcaatccgtgttttgtgaggcaggagtttttcatttcccagaatgtcgttcagtttcaaagtatcatcagctaaaataacaatttctcccggacaggcatggtcaaccgggacgatttcaccatttgacggaatacacatttccgtaatctttatttttttcttttttgacagcagcagggtatcccgtaaatggagcgtcccatgatacaggcgtaaataagaaagcctttttttccgctctgtatactcaaccttaaaaacatatccacataattcagactgaatatcgtctgtttctgtaatgaaagtttctgtaatcgcttcaatcagtttttctgttcctaaattgtcttttgcactcccatgataaacaggaaacaaagagcagcatctggttcttttgcacttttcatattgtaattcctgtatatccaaagaatcctctgcaacatatcgttctaatagttcatcgcttccggaaataatcatatcccatttgtccaaatcagaaatatcggtcatagttatctttggcgacagggaaacctcctgcatgacaatcatatcactggtaagtttatctttaatgctttggtaaacacgccgcaggtcgatcccattttggtctatcttatttataaagataattgtcggaatgtccattttctgaagcgcatggaataatatacgggtttgtgcctgtacgccgtcttttgccgaaatgactaaaacagctccgtcaaggacagataaagagcggtatgcttcggttaaaaaatccatatgaccgggagtgtccacgatattgattttataatcattccagcaaaaagaagtaaccgctgtctgaatggtaattccccgttgccgttccaaaatcatagtgtctgttcttgtagttcctttatccacgtttccttgttccgcaatcgctccactggtgtatagcaggctttcagtcaatgttgtttttcctgcgtctacatgggcaagaattccaatattgattattttcatgtgattgtcctccctttacagcccaaaaagggcataaaaatccccagcagtaaaatacttttaccactggggattataatttgcggacatacacatatacagcatacacctgtttgtgattgctgttttttggatatgtcaaaattgataaggcaaaagtattcttaaattgggtacaaaaaaccaagcccccataaaaggaactatcataatcctttgttcccactatttgattatagttttatttaagaataccttgccgcatattttttactccttttctggaatgaagctattatatcacatcagttttaggaaagaaagtacctaaaagaaatttttcttccccttatatgtaacaatcataccagcttcctggcgttcagaatggtttctgctgtctgctgtggtgtttggttggaattgtccagccaaaagccgatccgtggtgttgtctgcataaatgtatcgtataaggtttcgaccgtaaagccggaatagcctgttttctccctgtatcgttccctttcttttattgtttccacatctggacaaagaacgataacctcaacagggtatttatgcagataatttatcattcggtttaattcatcaccgtagtagttatcttggatcactacagaaaagcctttatcaaagtatgactttgccgcatcagcagtcaatttgtatcgaaggtacagctggctgactgcttccgctgatggggtagctgacatattttctctgcctgaaataatcatttttcggaacacatcaccacgaagatggacgcatttttctattgattttgccagtaaatcggaaactgtagattttccagaagccattaagcctgtaatgagataaattttttgattcatttcacttcctccggcacaaaaaatatgtatatgtaactaattcaacatatttataatttgaatagggacattatagcatttactaaatacaaattcaatgtatacggaaagaaagatataaggagtgggggattccgccgtagtcggcattgtatgaaaatccaaaagtttagattttcccacaatgcttatcttttagtctttggttcggaatagtgtagtgctggcggtctatctcttgttttcggttgcttgcttccttaccgtacatgagcatttggagaagggatatcacattcggagaaatggtatatctaattatacaatcaataaaaattctcgtattatttttcttgggccgattcccgatcataccgataatatcaaaagcacgaaagatataccaagctggaaacggatgtgctattgtattttaaaaaatgaccatacctgtcggtttatgggatttgggcttacgcggcaggaacaaaaacgcgtggatattatcagatgcaagtacggagggatgatagatggcaaataaggaattcagaagcccggtatacaatatcattgcagtaccatttgaaaagattgtacccaatacatataacccgaacaacgtggccccgccggaaatgcggttgttgtacgacagcatcaaggaggacggttatacgatgccgattgtctgttatcatgtaaaaagcaatgataagtatgtgattgtagatggctttcaccgctggcgggtgatgcgggattacccggatatttatgagcgtgagaaggggatgatgccggtttcgataatagataagccgctgtccggccgtatggccagcaccatccgtcataaccgcgcccgtggaacacatgatgtggacctaatgagtaatatcattaaggaactgtacgagttaggacgttctgatgcatggatttccaaacacctgggtatggaccgggatgagattttgaggcttaggcagattaccggcctggcggccctgttccgtgatgtgaagtttggacaggcctggcggcctgcggaggatgtggttccggacgaagagtcctctgatagcgggaaaacgcatactatctgcaccttaggaaatgattaataaattctttagcattaaataatacaattatcctacagacccaatataatgttagaggaaataagtctgttggggcaagtattaattcacttcagctggattggatgctggtaaaataatgaaggcggtatcatgaaaggatttaaacgacagaatcaactcttgtccctctgtgtattaaattgtggacgttgtcccatgtttttggataaaaactgtcctggctgcggcggtgaaggaaaccaggcttgcaaaattgcaagaagcagcatggagcatggcggagtagaatactgcttttagtgcagtgtatacccctctgaaaaatacaatcatattgacgacttcgataccattattaggtaccgccagtaagtggctgatttggaaaggccaggatactgaacatgctcctgtccggctataatgctggacggaaaaagacactcttttgtatagcagtaaatattttggatttacaaaagctgcgagccgtacttagggaaattgagggcagacctgatttagagggattgatctgaaactgcacaagaataagcgataagaaaaagcaatgagaaaatgtaatcattatttgccagagccgaacaacaataaaaggattgagaaaagcaaaactgaaaggaataattttatgaagtagacgtgtatgcttatatcggtggctaacattaatgctgcaagaaaattttatgaggatttgttcggattggaggtatttcaggactacggaagaaacatcgcatttacctgcggcctggcattgcagcaggattttgactggtttatgaatctgccgaaagaaaaggtactaaaaaaatccaacaacacggaaatcgtctttgaggaacaggactttgacactttcctgaacaagttgaaacagtacccggacatcgaatatctgggagaagtgatcgaacatagctgggggcagcgggtaatccggtttccacaatttttctacgttcttaggacgagccggtatttacttggaggatctgtatgtcaagccggaatgccgcaggaaaggttacggaaaagctattctgaaaaaactggcatctatcgctgtggaacgtggctgcggacgacttgaatggtggtgtcctgactggaacaaacccagcattgacttttatctgtctcttggagcagaggccatgtctgattggacagtctatcgcattgcaggcgatacattaacacagcttgctgagtaacatcacttcccatttgttgagtttttttaaaatctagattgatgaggtgagtaaatgaaaaatccgtgggaggaaattccattaattgattatgaaaatcacatgagccttgattctattatgcagttgcaggctatgagtgaaatgatgaaaacgcaagttgctgcttattctgtttcccgtataatggttttgggggttgcaggtggtaatggtcttgaacatattcagaaagacaaatttgaaagaatatatggagttgacatcaactcttcctatttgcagacagtcatacaaaggtatccggaattggacggttctctgaaatgtttgtgtatcaatttgatagatgaaacggataaattgccaaaagcagacatggttattgcaaatctgctgattgagtatattggatatatgtgttttcagaaagcaatccaacaagtaaatccaaaatatgtttcatgtattatccaaatcaatataggggataattgggtgtcagattccccttatattcatgtttttgacgatttagaacaagtacatcatcaggtggaagaacacacattagaggatgcaatgcttgaaattggctatcattcaattaaaactttggaacatatgctgcctaatgagaaaaaattggtacagatagattttgaaagacaacatccaatttgtctgaacagacttgaaaaagtgtaatttgaaaggagaatgacgtaatgaaaggatttagtggagaagcagaactggttatgattgaccgtttcggaaaagatacagttatagcactggcaaccacgaaaaatgaaatgcctcatgtgcggtatgtaaatgcctattacgaaaatggtgcattttatatcattacccatgcactctcaaataaaatgaagcatataaaagataatcctgttgttgcagtcgcaggtgtgtggtttacagcgcatggaaaaggcgttaacttgggctatttcgggaaaaaagagaattgtgagattgctgataagctgaaaaaagtctttgctgaatggattgataacggccatactgattttaacgatgaaaataccatcatactgcaagtggaattaacagatggcctgttgctctcgcgtggtacaagatatgagttttaaattttcaaatttcctactgtgttaggtcaagcattatcagagcttatcctaactgtttgcaggtaggctgtttaaggaggttcaatgaaaggatttaaccgacaaaatcaattattttctctctgcggtttgaattgtgggctttgccctatgttcctaaataaaaactgccccggctgcggctgcggtgaggggaaccaatcctgcaaaatcgcaaggtgcagcatggagcgcgatggcgcccaatactgtttccaatgcagcgaatacccttgcgaaaaatacgattatattgatgactttgattcctttataacacatcgaaatcgaaaatccgatatggaaaaggccaaacgccttgggatagacgcttataatgcagagcaggcggagaaggccaacattctggaggttttattatccaattataatgatggccgcaaaaagacactcttttgtgtagccgtcaacctgctggaactgcaagacctgcaaacggtacttaaagaaattgactgtaaacctgatatggaaacactgacgttcaaagaaaaaagcgcttttgttgctggattactgcaggatgcagcggtaatgaaaaatattgacttgaatctgcgcaagaaaaaaggataatttgaatatgctatgatttttatagatgaattaataattatagctcaccttaatcctacatagttttatagtgtgccgttgaatgtagacttaacaaaaggccaagtgttggctgcttgaacagcgatacggaaagcaaaatttttaatttataggagaataaacatgagcgggaatcaaaaaaactattcaaccgttaagtgcaatacttgaaggagttccagacagtgagtatatacaaagcgagttatatttaacagaaagtgtgcaaatgtttttaagggcaggatatgtaaatgattatggcgagaatgcaggtgtatgccgtaacttagaagattattttacggttggaaatagggagggggggtaaaactggtgatctatatagcaagggtaatggcactgacttttgaaaatccgcaacaaagaacatgggaggtaatattcaccccgtgctcctaactcattatgagttctttacccttacttatcaaaatcctttcggaaaaaagcctgtactttgaatatgtacgtacaccctgattatccaaaataaagagatttccatggagttgtattgctttttgggacgtcctcatctgtcaaatagagccttacgagtgtaaagatcagtaaaataggaatttgcgccacctcattggacttggttgggcctcttgacttttattttcttacaggtgtaatatttgtaagagtaatgattagattttaaatgcttacaaaagtgcagataaatattttttcaagtatttattaatgcatttgaaaagtgtccagaaagggtgatcggacagagatgaagaaggtagaaaaacagaggctgtttattgcagcgggtatccttattcttacagtgaccggatgcggcagaaaaacacaggaaaatcatgatatactgcaacaaacagaggttagagaagaacatttggaaagagaacaaccgaaagagaaccttgattacgatgcggaatatattgctgcgctttatcgtgacatctacaatcaggcagctgagatgggaaccttaagtaatctggaggttgtgagaagtattgttgaaaggattggggaacatggttacgctgtggtagacgaaggtaatcagattgatatggttggcccagaacaggttttacgtttttgcagatcggtagacgggaaacaggaggcagagcagatattaatagtggtcaccagttttggtggattcattaaatatgatctccacacagtagatggtacagtggatgtgatcagaggatattataagtatgtaaatgggagactggaaaacatggatacagtgtgctatcctgtagattcttgggtatatacaaaagagggctatctgctgtttgagggaagtcattattccgaaatctattatgcactttctcttagtgatgagccggaatatacggctttaagagtgttgccgctggatgaaacatgtaggaaactaaacagagattatctgttgccagtggggtatggaggaaataatcttttccttgttaactggagcgaacaggattttgaaaatctggatttttacgatttgttcgacagattctatcctgatctttatgaactgccagttccttttgagaccgatgatgattctggtgtcggggccatttacagaatatcggcagatatatttgaacatgtcattgatgtccatttcagtatagaccataaggagttgagggaaaaggcaacctatattccggaaaatcatacttatgaatacaggccaagaggattttatgaggttgaatatccagatattccatatccggaagtggtaagctatgaagaaaaaaacgatgggaccataacccttaccgtgaatgccatatacccggaaaaaaacacctccagagcattcacccataaaacggtggttcgtccccttgacgatggtggttttcaatatgtatcaaatcagatcatttttccagagattggctttgaaccatggtggcattcggaacgactgtcagaagaccagtggaaaaaggtatatgaagggaatgattagctgaagatttaagatgattttcagaaaacgaaggggcccgtttttcctgttatttttagtagtgacagtcggaagtttatttgcaggccagcaggagtaagtaaacaggaagcaccgcgggcaatctcccggttactgcgcatttcccacaggggcaccctacccaaaggattgaaccaatacaggatactggcaaggtaactccgacagtgtgtgggtgatttcctccgcctcctgaagaggaatcgcattgatttattaatcagttccttttcctgacctttatcctgaccacaaccgtttcttcactaaaataatacatctggaaagtgttggcatccgggattgccctggcaaggatatccctcctttgccaaagatatgggaggatattgcgattccttccgcaaagaagtgttttctgcaattaagggaaagggcagcttcctaaatgggcagcccatacatgtatcaaatgcagaaaagctatccgacacaatgattgggctggaaacagcaaaaagagaactggccgatgaaaactttgcacggttccgcaggggggggcagtcagtgccaggatgtacgcaggattgtctctgccgctctggaactagataccgcctgcggcagacagggaagctatttcgagatacacctgaatccctagtgtaatatttatagagcgtcacagcagaagatttggaggaacatgcaggagatgggtatacagcgggtagggtaatcgacagaagcggaatggcgagggtgttcgaacgtgaacggacaggcaaggacggttgccgaatctataccgtggattaggaaggtaatgagaaagaagaacttgcctgtatctgacgcagcatgggcaggatataccgcgtccagtgagtagtgggctgcacttgacgaagatgaggataggcctttgtatagtcggtccggtaagtatgctgtccgtaatctgcattcaaacctgttagggtacaatatgtatccaataaaatctatccttccgaggataattgtgaggaaacatagtatacgcctcgattaactgaggaagaatgggaagaactattatgggggtgaataatggaagatgtaagatggctattgaagaaatggggattcccgattttgctattactattttcagtaatagcaggagtaatttattggggaaaaatgcatatggaagagatgaaggtggcagaagaagtatgggagcctccggtggaaattgagaacgctgaaacggtaccggaagaacaaaacgttgcaaaaaaatctacggagtcagtttattggtttattccacaagccagtgatgagcttctttcagaagaggaaaaggagcaactacagagtaaggttttgtcagcagcagaatcggtcaaagaaatctataaggatatgataattgcagatgctgcggattattcttcaggcgttggtggattttcaaacgaacaaagaaaagcggttgtggagcaactagggaaggtaggcttggtaagcgtagaagaaaatagcaatatgcaaaatcctgaaggaataaaaacattttatgcggattacctgaatgggcgggattcaatggttacagtattcgaagtgcagagggacggactgattggagcagtaacttttatttatcggaaagagcagttacagagctattacataggagtccggtggaaggaaggtggtacaccggaaatacagggaacttcagtaagcaatgtggctgaaattaaacttacggaaaaagggtattttatctacgcatatgattatgtgattgcacatgcaagtttgagagagtattggagaatagaaccgcttcctgaggcctgtcgggaactgacaaagaaatatatatcaggattaagctacgtggattataatatgcttgtcataaactgggatagcagcaacgttgaggacattctgatgccctgtatgtatgaagatatctatcggatttatactggcgaaaatctaagaacgaaaaaatggaaaatcccggcagaggaatatgaaagaataatgaccacgtattttccggtatccatagatcagttgagagtgcattgtgggtatgatgagggcagcaacagctatgaatatgagatgatttatgccagaccatatccgcctttcggagaagtagttgactatatggaaaatgcggatggaacgattacgctcattgtggatggagtatggccggattacaattccgatcttgcttttagaaatacggttatagttcggccatttgaagatggaactttcaggtatctttctaattctatagagcaaatagaattggaattgccgccaatagcaagatcacagtaaatgtactttcgaatgtaaggatgattttatggtattaaagaaaaaaagtacgctgttaatcatggcatttctgattgggctctttgtatatgcctgtggaaaagaaaaaagtattacgggcgaatctcttctgaaaaatatagaagaggtatattccactgaggaaaccaaaagtgcggaggaagagttagcggaacagtgggaaaagggttacggacttccggtggacgaacaggaggagaaagaggctgagaatgattgcgaatcaatgatgaaacttctttttgaaatttacaatggtgcagataaagaaacatcatccaatgttattttaaatgatgaaaccattcttgaaatgcagaaaaagttaatggaaacagagtgcccgattgctacagtgatgacatactccaatatggaaaattatgagagggtggattcttttcttgaggattgtatggctggaaatggcggttccgtagtaatgtataagatacatgatgatggtggcctaggcagaatgaaattcatttttgagggcacggatatgtatgttgtaagtgcaaaaagcgtgtggaatgaggagggtaagtcggtaatgtcctatatttcctacaccagaatcaaagaatggaaatatacagataaaggatggttttgttatgaactatgtgttccggagccgccagaggttagtgaaatcatggatggaagcttcctgatcagaataaaaccgatgacagaagaacagcacgaaatgtctgaacggtgtgtgaggaggcttggctatcaggggaataatattttatgttcgaattgggattctaaccatatggaggaactggattataacggaatgtatgaatatctctatgtaatgaaatatcaaaaaccgtttgagccagaggattatcaggaaggaataccaaaagcggaatttgaaagtctcattatggagtatcttccagtaacggcagaacaaatacgggaatatgcagtgtttgatgagaaaaagcagaattatgcctgggagcgaattggctgctttagctatgcaccaactttctttggaacttctttacctgaggttatggatattaatgagaatgaggatggtacgattacattaacagtggatgcagtgtgtgatatggtgatttgcgatgatgcagtaataacccacgagcttacagtgcggtttgctgatgatggcagttttcagtatttaaggaataatattcttaatgacggaatacaagacatacctagttatcaatatcgtatccgtaaggagcagttgcgggtgaaaaaatgatttgataatcattgagttttacaaatgtaagaaaatgaaggagaagtgaatgaaaagaaaaaaataaattaaaaaattaggattttaggaggtacataaccatgagaaatatgattgcatactgtgggctggattgtgaaaaatgcgacgcatatcttgcaacaatcaatgatgaccaggcgttacgtgagaggactgcaaaacggtgggccgagttgaataatgctcccattttgcctgaacatatcaattgtgaaggatgtcggggtgatggaattaaaactatattctgcgatagtctttgcgaaattcgtcagtgtgcattgaaaaaagatgtgacgatatgcggtaactgtccggacatggaaagatgtcagactgttggagagattatctcaaatggtcccgaagctttggataacctgaaagggtaaataggatactctgacaactttcattttattgaggataacacaaatgaatgtaacttttagaaatgcagaacggaaagatactttattgatcttgcagtttatcaaagaacttgcggataacgaaaaaatgctgaacgaagttgtggctgacgagaccacacttgaaacatggatcttcgataaacaaaaagcagaagtgatttttgctcttgaagatggaaaagaggttggatttgcgcttttttttcacaatttttctacgttcttaggacgagccggtatttacttggaggatctgtatgtcaagccggaatgccgcgggaaaggttacggaaaagctattctgaaaaaactggcatctatcgctgtggaacgtggctgcggacggcttgaatggtggtgtcttgactggaacaaacccagcattgacttttatctgtcgcttggagcagaggacatgtctgattgggccgtctatcgcattgcaggcgatacattaacacagcttgctgagtaacacgacaaaacaaatttgggcttaaaaagaggaaaatttatgtttgaggacggtcgaagcaaaaaagttatttttatagcgcattgtatattaaatcaaaattcaatatctgacgggacagccgtttttccagcagcttttaaggatgtaataaaaattcttcttgatgctgatattggcattgtccaaatgccatgtccagaactttgctgtttagggcttaatagaggaaataacgatggggcagatgttcccgttgtcattgaaaatacccgcattcgtaaggaaatgcaaaaagcgaaatcttacaaaatgctaatggctcaagttgactatgtgatgaaacaaataacggaatacaatgcctacggctttgagataatcgggattattggtgcaaatcgctcgccgaactgcggtgttgaaaccacatcagattttaacaaagagataagcggtaaaggtatttttatgagcgaacttagcaatcgaataaaggcggaaaacttgaatattcctatgttaggcatcaaagatactgataatgtatttgaacaagtaaagtctttcattaagtcaaacttggtcaaggagtagcagaaaattaaataagaaatattgagagattgtggtatgaaaattgagtataaagacacccatatttttacagagaaagaactgcaaagactgtttttgtccgtgggatgggagtccgggaattacccggataaacttgttggggcaatgctaaattcttcacatgtaatttcagcatgggatgataacaaactgattggactggtacgggcgcttgatgatggcgaaacagttgcatttctacattatcttctggtagaccctgcatatcaggggcatcatattggcgatgaattgatgaaaaagattatgagttgctttgaaaacctcctttatgtcaaaattatgccgtctgatcctaaaatgattgcgttttatgaacgatatgggtttcagcaatatgataattactcagcaatggtactgaaacattttcgataacaatatagcttccggtttatctggaatttgatcagagtagaaaagtgtattttaaaaggagaataattcaatgaaagaatttagtcaagaagcagaacaggtcatgattgagcgtttcgggaaagatacaattatatcattagcaacaacggaaaatgcaacgccttatgtgcgatacgtcaatgcctattacgaaaatggtgcattttatatcattacccatgcactctcaaacaaaatgaaacatataaaagataaccctgttgttgcaatcgccggcgagtggtttacagcacacgggaatggcgtcagtctgggctatttcgggaaaaaagagaattgtgagattgctgataagctgaaaaaagtctttgctgaatggattgataacggccatactgattttaacgatgaaaataccatcattttgcaagtggaattatcagatggcctgttgctctcgcatggtacaagatatgagttttaaattttcaaatttcctactgtgttaggtcaagcattatcagagcctatcctaaccgtttgcaggtagacaaccgacaaaatcaattattttctctctgcggtttgaattgtgggctttgccccatgttcctgaataaaaactgccccggctgcggtggcggtgagggaaaccaatcctgcaaaatcgcaaggtgcagcatggagcacaacggcgcccaatactgtttccaatgcagcgaatactcttgcgaaaaatacgatcatattgatgatatgctgatgtatctgggcgaactctatcaaacagatgaacgatttgtcgagtatatcaatagatttgccacatggaatgttgcggaattttttggtgaagcaattaaagtctattgctgtaatcgctaataaactattatatcggggcaactttgcggaggtgacttaaaagtaaaactgctcgcaggataatcgtaagaaattgcgttaaaaatcatatattatccgaaaagaaaaattcgcttcattttgatatgatatttatcggatggagcgttttttacgtctaaaaagaaattttggataagcattatttggcgactatattacctgcgagagaagtcttagattgtgtggaggacttttggaacaaacaaaatataatttggagttttacagctagcatgcgaattccacaggaggttttgaattgattttcaggcagcttttttataaactaaggctccagccaacagtttgggaacctgaatatcagatttctccaacatagataaaatggaaattgtgtgtatcttaggaaataattaatcatttatccattatatataaacacattagtgttatggatccggtataatgtatatgatttaatctgaaaggagtgtcatgctttgcttgaaaaaatacttattgttgatgatgagaaagaaattgcggatttgattgaagtatatcttcaaaatgaaaatatggatgtatacaagttttattcaggggaggaagcccttgtctgtattgggagtacagactttgatttggctatattggatatcatgcttccggatatcagtggactttcgatatgtcagtccatacgaagtaaggagtacacatatccggtaatcatgcttacggcaaaggatggagagacggataaaattaccgggctcacgcttggtgcagatgattatattacaaaaccgtttctgcctcttgagcttgtagcaagggtaaaggcccagcttcgccgttacaagaaatacaatgtgggagcagtggttccggcagcgaatgaaatctttaaatatgccggattgacaatgaacattaagacgtatgaatgccggcttaatggagaggcgctgtcactgactcccacggaattttccatattaaggattcttttagagcgcaggtgcagtgttgtcagtgccgaagaattattccatgaagtctggcaggaagaatattataccaagagtaacaatacaattaccgtacacatccgccatctacgtgagaagatgaaggataccggggaaaatcccagatatataaaaacggtttggggggtaggatataaaattggtgaaatttaaaaaagcaaagtacaactattcaaaactcggccgtattacgtttatccgaggattacggattacagtgggagcagttgctgcggtctttggactgcggatgctgacacgtggacacctggcagatgcgattgttaggtggtttgcacgcagtctttcaatcagtgagatggaagctgatttgttatatttcaagatagtgactgtcaatatgcagtttattcttgcgttggtcataatcatatttgtttttttgttgttccacatgctgttggacacatataaaagatattttgatgaggtagtaacagggattgacaagcttatggaggaaagggcagcgatttccctgtctccggaactggagagtgtggagcataaactggccgatgtaaagcggacacttgcagaacgggcggataaggctaagagggcggagcagcagaagaataatctggtggtatatctggctcatgatatcaagaccccactgacatctgtgataggatatctcagccttttagatgaaacaccggatatgcccgatgaggagaaagcaaaatatatccacactgcatgggaaaaggcgaaccggctcaggattctggtgaatgagttttttgagattacccgcagccactcagaatcacttccgcttcataaggcaaagattgatcttttctatatgattgctcagatttcagatgagttgtatccacagttgaatgcatgcggaaaaatcatagagaatcatgtggatgaggatatatctgtatatggagactctgataagctggccagagtgtttaataatatcctgaaaaatgccatttcttatagtgaggaaaacagcgttattaaagtctcagccagagagctttcagaatggacggtgattcgatttgaaaatgatggggaaattccggaggataagctcaatgtgatttttgataaattctgccgtttaagtaatgcgagattaagcgaaacaggaggctccggcctggggcttgctattgcaaaaaatattattgtactgcatggcggacagataagggctgaaagcagtaatggacgcactgctttcattattgaaatcccatcagcatcatccaaaatctctgtcacagcatcttagcgattttaatacatctgccatttcgattgacctgatagaacaggcggggaatcagacgattatataatacattaaaaaggtggtgagcattttgaaaattcgcagtgaatttacatgtccgttagaattggttcacgatatggtaaagggcaaatggaaacttattataatttttaatttgaggaaaggctcgtgctcattttctgatttgttacatagcattgatggaataagtcaaaaaatgcttttggagcaactgaaagaattaaaacattttggcttagtcgagaaaaaatcctacgctggttatcctctcaaagtagaatattttctaactgatatgggcttaaaaatgctatcagcgattgagataatgcagggtattggtatagagtatatggtaaaacacggaatgtcagaaattcttgatgaaaaaggaatttgttattgacgctatgcacgaaaaagtaagtaatttacttgctggcggctttcatgtattattttatcatatagaaatgtagaagggatttgataaaatggatactgcattagtaataattgacgttcaaaatgactattttccacaagggaaatgtgagctttttcaatcagaacaggcattaaaggtcacaaaaagactgctgaaacattttagagaaaggaaactcccggttttttatgtacaacacatatcaccagaggacgcagctttttttctcccaaatacgaaaggcgttcaacttcataaggagatagaacctttaggttcagaatatattattgtaaagcatacgcctaatggcttccatgaaacaacattgcaagaaaaattaacctctttgtcaataaagaatttggtaatgtgtggaatgatgacacatatgtgtgtagatacgactgtgagagcagcaaaagatcttggttatttggttactcttatatctgacgcttgtgcaacaaaagacttagaatggaacggtcgaaagctgcctgcaagttttatcaatgatgtatatatggcttcactgaatggtagatttgcaacggttatgtcaagtacagattatttgctgtaaatgtcaagtcaactcagactgttacggcaggggcgaaaagacgttgtataacagggtttttcgggcacggaaatcaagcggcaagattgtacttttcccgcataaacagcgtcctgtcgcatacatgggccacagcacccgcaacaagactgggtgctgtggcccatgtacggctgactaatctccatcattatgtggacgctttttgggattctttttatcattgtattttttcataataaccatttttagtaagccaacgacaatcaaaaccgcggcaatgataatccaccagtattgcttcataacctaattcacctcctttcagttgtcttaaatcatctgccccgtcctatgcagaatggggaagttgattatcctgccagcttctaaaacagacattttataaggaaataataccagattaaagctgccgccaaagccatgggaaaataaagaaccgcctcactctgtacggctttagctgcccaaaatgatggaaggaagccaaccgcaaactggcagtaaccatcaagcaagaatggggctggtattcctagtaatgtaagtgcagccagttttgtaactgccattccctccagtttattagcggaaagggtaatgatcatcagggccaccatgatagcctggaccgcccctaaaacggacaagcctaaaaccatgatggcggaccgtttttccaatgaaaagactaccatcacaataaatgtaacaaccgttgacagaattgcaggcattccaagtcttgaaaaaatataccctgattttccaagcggagttattgaaaaatacctggaaactttatcatcaatttcttctaaggtaatcatggcaaaagcaaaacaaagaagcactggcgccatgatagaaaggaacaagtcaaacatcggataatagggctgtaaagaaaattttgccgctttttctatcaatgggattccaaatttaataagggcgccaaccagaaacggggtgaaacaagctgcaagcatcatgggatccttttttatctgttggaatacctgccctatgctgttaaatacctttttcatatctataatccacctttctgcgaaaggcaccaatggggttatgaaacagtttcaatcccaacgtcctttctttcctgttttgtgttatcctcttcctgtaggctgctggtacactacacaacccgaggaggtaagtggcggggctgtatagcggcaaccccgcatatctatatggtgtcggccatccgttaaggcatcaatgattggcgcattgacctagcccgtaaacttatctcttccgaagttgactcgatttcgccggatggccagtcactgccagccctaccattcttttttgtaggagggactacatgttcaaaatatttcgtaacaactgctgtgggcttgacgtccacaaaacctggatctatgcctgtatcgggattaccgatgcaaatggacgcaccgagtacaaacaggctcgcttttcttccttttccaaaggtcttagagatttagctgcatggcttgccaattactcctgtttcgaagtttgtctggaatcttctggcaagtactggatccccgtattcaacatccttgaaaaaacctatcttgttactctggctcacccgaaatacaccaagccgcaaaaaggtaacaaaaccgatgtcaaagatgctaaatggatctgtgaccttttcatgtgcgatatgatcaaaccaagtttcattccatcgcctgaaatccgtcaactccgtgacctgatccgttaccgtatcaagcttacaaacatgctgactggtgagaaaaaccgtgcacagaactgtcttacggtatccaacctgaaactggatgatgtcttcagtgatgtctttggcaaatcttccagatccatcacaaaccacatgcttgatcatcctggtgaaaccttcgatgttgccccctttgtagatgcccgctgtcaaaccccgcttgatgaaatacaggctgctgttgacggtgcgatttcctctgagcaggctgtcaaacttcgtcaatgtctcgcacacatcgatgagctcgaagcccacaggaaagaaatcgagcgggagattctgatgattgcagaacctttctccgctgttttggagctgctttacacccttccgggacttgataaaaatccgatgaccgcaattgccattctctctgagattggtccggatatgtccgtgtttccgtcatccaaacatcttgtttcctgggctggctgctgtccacggaatgaccagagcaaccaaaaagtgaaatccagacgcatttcccgcgccggctgttatttgaaacctcttctcgtccaggttgcaaacgcactcatcaaatcaaaaaagcatcctgaatttaaagaaaggtatcgcagaatcaaatcccatcgtggacataagaaagcaatcatcgctgtttgcaaaatgctcctgaccgctatctggaacatgttaagcaaacttgaaccttataatcccgatggtttcttagagcaccgacctgtcaatgagaaaagagttttgacaaagtcacaggctcttgaacttctcagacttagaggatatacaattacaaacgattaataattgttatatctaagtctgtccttataatttatgattattgccaacaccattttgtgaggggcttgtttgctatactcttttttattggcttacctctacttttttgtttcaaactttcacacctccaatactccgccacatttttgataccatcttatgtgctgccggatataatacaaaatttgccgcaagaacaagaaccaaatccaaaaacgggttctggctgtaccctgttattaaattcatgcaggccataaatggaaagaaccgtaaaattttcggtaggtttttgacttttttcaagtaaaacaatcgctcccatgaagaacagccccatggctgctggatcggaataaatcataatggcggctgcattgtgtttccagttatccggtaaagctgtaatgccgaagacataaatcaccgtcaaaacaaaataaataaagtaaaagccatatttccattggaagtgaatatcgccgcagactaatcttcttaatttcattgcagcgtcctccctgttatatccacgaaaatatcatttaatgtcggctcactgctgtggacagagacctagcgatttcctgaaaaaaagcgcattgtgtgataagcccggtaaaaaataagatgatataatgtgaacatcaaatacaggaggtacaaaaatgtacgcatgggaagcaatcgaacaatccttaacatttatcgaggaacacttaacagaagaaatttatacggaggaactggcaaatatcgccggcctgtcccctttctattttcagcgtttgttcaagcggctagtaaataaaacggttcaggaatatgtgaagctccgccgcctggcaaaggtgattgaaaatctgggtaataccgaacagagaatacttgacgttgccctggactatggctttacaagccatgcaaattttacgcgggccttcaaggaaacgtatggaatcacacccgaagagtacaggagagatttaccaatgctcaacacattcgacaagccggaagtttccatgaattacgtcttagtagatgaaggggttccgcaggtggtaggaaatatcgtcttggaaatccagagaaaaacgttggcggaaccggaagtttatctcggcttggaaacggaagtttgtatttctgaacaaattccggctggtgaaagcacaggtgtagatgtgccgggacagctctggaaacgctaccatatgaagaagacgtcaatcgcagaagacttcgatacaaatgtggaaatgggaatgtcccatacggaagatacggcacagggccttttcacgtattttgcgggaggtcttgttcgaaatatcccggataaacagcagggagactttgtaaagagagaactccctgcgggagaatacatcgtttgcaggattgaagcagaaaattttgaggatttggtaacggttgccttgaatcagggtgaaaaatacctttttggtacatggctgccgcatcacagcttaacaacggagccattctcagcagaaaagtattatcgtgccttaaaagatatggcctgtatggaaatttgggtcaagcctataccgttggaaaaaaaagagtaggagggatattgggatggattggaatatgctttatacaaacggcgatgctccatctctgaagcaacggacagaaatggctgatgttagaagtacgggataaggagattatggataatgtttttgaactgataaatctaagaaagaggagtatatcgccttaggaatttcttaatcattcatttaccattccatagaaaatcaattatttcatagcgccgaagcaggttactggtttctctttcgtatttcatactaatctccattccgcgcgccttcgggcgcggcacagatagtaatgaaagattttcaagccctctactccatgagataatagcttcaagaagctacactacaaagcacgggaggaggagttgtaaattctttctcgttttagacagcatactaatcagtgtaagtcctgccttttcaagcacaaataagtggcgccatgagcccgtacactaagaattgttttaacgccttggctaaattgtgtggcagttcagtcaatggcttcttatctttttcacgaaaggagtatgactatgaaagttacttacctaacctgttgtggtgtcgatgttcacaaatcatttctcgttgccacaatcgtcaagactactggtggtatcgaaccttcttatcaaaagaaacgtttttccaccttcaaccactcaattcttgagttcaagcaatggcttcttgaaaatgaatgtcataatgtctgcatggaatccactggtaaatactgggtccctgcctttaatcttttagaagatgaaatcaatgttaccattgctaatccaaaatgggtaaaggctgtgaaggtaacaaagatgacaccaaagattctaaatggattggggaccgattccgtctcggacttgtgaaaggcagctacattccttgtaagaaaatccgtattttacgagaatatacaaggtatcgctacaaattggtttcctgccgttccagtgaaaagaatcgatatcagaatgcgcttactgtttgtaatgtcgctttagattctggtgtttccgatgtctttgggaagtcatccacatccattattgattacctgcttgagcaggctgacaattctatcaaccatgaagaaatcgcttctaagcttcttagaagtcttaaatccaaagaagatgctgtgattgaatccattgaaggatatcagatgactgattcccagaaatatcgtatgcgcctcgtccgtgcacatatggattatatcacagctgtgatatagactctatgatagaatctatgatttcctctgatcctgattatgaaaatgctatccagttcctaatgactattccgggtgttaaacgtgatagtgcaatcactatcatctccgaaacaggtattgatatgtctcaattctgttcttctaaacgtttatgctgttgggctggtttagtccctggcaggaatgaatctggtggcaagaagaaatctgttcggatcgcacgtgctggagtttacctcaaacctgcattagtacaatgtgctcatgcagccgttaaatccgaaaagtctccttactacaaaaagaaataagaatctcttatgaaacgccgtggcaagaaaagagccatagttgctatcgctccaatgattcttactgcaatctaccagatgttatcaactggtagcatggaatccaagcgacttatacaaaatcgaacacttcaaaaagttgccatttcttgacagcttagattagtgcgccactttttggctgtcctctactttctttcacactaatccctcctaattgtcacaatagtaaacttatatggcaggaaatggatgttcaagaaaaaatatggcgaaaaacaatacattatgacgaaaaaggtcgaattaagattacttataataaaaatgatattaagaagtaacaccttgtctaatcgtcccatatagtatagtacaaacctatattaaaaggaggagtaaagaatgtgttgttgtagatgttgttgtagatgttgttgcaaatgctgttgcagatgctgtggtaatagtaatagtaatagtaatagtaatagctgcggttgctgttgttgttgctgttgttgtccatggtggtgcagtactggtggagaaaacaattggggcggtaattggggcgacaattgggatccttgtgcgaatgaaagacgctgggcatacagagaggggtttaacgatgggtatacggtaggatttgaagacggaagatggaatagacgtccatgtccacggtcaaattaaaatagaacaaggcgagtaccggacattaaccgagctcgcctgttttagatgatattcaaatgatgttaaaattgataaataaaatcaaagtcgcggaagcgtatgttttccagtctatccacatagacgtctgcgtaagacagcggttgagtgcctggcccgattacagcaagaaactgcctattcgcagtatttggagaaactgaagaaggcagaattgctaacaattaatcgccttctggagactatgttgccccaggttgcaaccagcatagacatggaggattatcaggagctgggaaagattgccagaagctatagtattggggattccgagggattttctgctatacataagatgggttctcaatcctcataatggtgtgagagtttttttctataagctctgcaacatattcctgggtccatccttttctctctctggcgtctttgagagcaagccccaatgcgtgaaagtaaaactgtcttgttccattgcattcattatcatttcacccgatatcattcaacattttgggtgattttatgtgtatgaaatataattcaatgtttaggagtagtttattccgtgtagttcttagtttgagagactgataaataaaaaatacaaaacacgcttgacaagtaatcggtcgtttactataatatcaaacagagagtaaccaatcggtgactttttggaggttctgagaatgtcaaatactaaggaaaaaattttactaactgctctccacctgtttgcacaagatggttacgaagctgtttccatgagtaaaatagctgggaaattgagcataacaaaaggtgcattatataaacactataaaaataagcgtgatatttttgatactatttttgaacgtttgtgtcaattagatatcgagcgttcaagaaaagcaggtgttcctgaaaaagagtttgatggagcgaccaaactttttaggaatgtttctacaaaaagtgttaaggtatatatgcaatcgcaatttcaatactggacaaacgatgaatttgcctgcaattttcgcaaaatacttacattagaacagtatagaaatttagaagcgacaaatctatatcaaaaagttttagggcgtggccctgtcgattttattgaagatttatttcgagaaatgatggaagaagggacttggcgtaaaggtgaccccaaacaaatggcagtcgaattctatgctcccttctatctgctgttgagcatctcagatgctacatcagacaatgaggaaaaagaaaaaattgcagatatttttacagcacatattgattgttttatagaaaaatatgccacaagtaaactacaaaataatgaggatattcaaatatgaaatacaaatggattttgtgtcctgtttgcaagtgtccaaaacgaaaacagtaaaagcttatttttgaaaaagacttaagagtaatcgttgccaaagaaaatagtcatacaattaaaaaaagttcaactaaagttgttcttataaaaacaaattagaatttggaggatgaaaattatgttatcggagcttgttttatagccgggaggtttgtgtaaatccaatctctaccaagcctcccataaaattattatcattataatttttttggaaggataaaatacatgaatagagagaataaaagaaaacaatacgaaaaagggtactacaaaactcatgcttgtaatgatagttttacctgcaaagtttgtggtagacttgtaattccggcaggtgctggaagtgaacatcgcaatcattgtccgaattgtttacaaagtctccatgtggatatagaacctggagatcgtgagtctgattgcggtggcattatggagccaatcgcggtatgggtccgaaaaaatggagaatgggcaattatccatcgttgccgtagatgtgggcaactttcatctaatcgcatagcagctgatgataatccgatgaaactgatgtcaatcgccatgaaacccgtagcattgccaccgtttccagtagagaggattgaagaaatgactaacctaatggctggtgacgggagcttgaattaaaaaatcataggaaacgtagagtcagacgtaaacgcagagccgatatcccatctatccgatgtggttatcggcttttattgtgacttcagcatctatgctttatgatgttatggaaggccttgtagttgacgcacatataggaaagtaccggatgaacgagcgggagtctgcgatgaagcatattgatttatttatgaaattaaaaatcacagtataatcaattttttatttaatcgaggcatcgattctatgaattatttcaaaaattagtcaataatcgcatatttttcgtaatgagattatcaaagtcattcaagaagctcattgataacagtaagttggatagatagatgatttataagcccagaagtgcaaaaactcacttgttgcttagaattatacattttactctttcagatggaactacggaatatcttgtaacaaacattacagattaaacgtccattcttttctctctctggcgtctttgagagcaagccccaatgcgtgaaagtaaaactgtcttgttcccttgtattcattatcatttcacccgatatcattcgatattttgggtgattttatgtgtatgaaatataattcaatgcttaggagtagttaattccgtgtagttcttagtttgagagactgatagataaaaatacaaaacacgcttgacaagtaatcggtcgtttactataatatcaaacagagagtaaccaatcggttactctctggagattctgaacatgatagataaaacaaaagaaaggtaggtgcgtgtatgtcatatttcaaatatcaagataaatccattttttatgaagaatacggacaaggcgagccgattatcttcctacatggcaatactgcttcttcaaaaatgtctgaatttcttatgccgctgtatgcagaaaattttagatgtattttgattgactttttgggtaacgggcagtcggaccgagtagaaaacttttcgccggatatgtggcatgatgaagccttacagacgattgctcttactgaacacttacaatacggaaaggtcagtcttatcggaacaagcggcggcgcatgggcggcggtcaatgcggcgttggaacgccccgacttgtttcatgcagtcgtagcagacagctttgacgggcgcactcttaatgagaatttttccgctaaccttttatctgaaaggaaagcggcaaaagaagatacacagtcaaggcaattctacgaattgtgccagggagcagactgggaaaaggtggttgaccttgatacagaagcattattgaaatgtgcggaggaaaagcgtccactatttcataaaccgttggaggaattaaaaacgcctatcctgttcatgggaagtagggaagatgaaagttgccgaaacaacatggaagaagaatatagagaaatggcttctatgctttctcaatcttccgtatatcttttcccgaaaggaggacacccctctctcttttccaatgcagaagaagccgcaatgctgataaaaaaattcataagccaagccttatttggcgattatattacctgcgagtgaaatcttagagtctgggaaggacttttggaacaaataaaataggattcaacgacattctattttaacaaaagcaaaatggattatggcgttaaagctataattgacggcatgcccgttaattttaaccgtttgaggtttctggttcaaatataatccaaaggaatttttttactaaggttctcattggaacagatgcctcggtaacggcaatattagaaaatatctcaataaatgattatatttgcgaaaccctgaattgtggcattttgatgtgaatgaattggtgcaggacgaagcagattcatgggaggaatatgttgaataaaattaaataaggtgaattatgaaaaataagattaatactattacaatactaataattctgtttgtgtcggtaggaataggtacattcatatgtaatgtattagaacgcactgaaataaatatatggcttgcgagaggaataggtgctttagtcacggtagtaggtttccaactatgtaagagaaaatcagatagttattgggatatatacactagaggtcgtaacggcaactaaagaaaacttatttgacagtgaatcagggcagtgatttaatacattccaataaaaaggagcagcgaaccaccatcggtggattttaaatcgtcttcttggtgctttttaataagcacccgtataaaatgaaatgtgcaagacttttattgtggcagatgccgaccacgataaaagtctttttaaatatcgaagctggtccccattcatctgccgcgcacatgctttaaccataggagtgtcagatgacagaaaggagattgttatggggaaaagggacatgaggaaagaaattgcagaggcggttactgcatcggatagggcgctgaaaagcctggaggaggcagggctgtatctgtcaaaagcagccggatggggcgtatgggacctgcctggcggcggtatgttcggtacgttcatgaagcattccaggatggatgacgcaagccgcgccatggaagcagccaagtcccaccttaggaggctgaaacgggaacttctggatgtggagcttcccagcgagttcaagctggaggcgggggacttccttacatttgcggactacttttttgacggcatcatcgctgactggatggtgcagaccaggattaaggatgctgaggcacaggtggaggaggcgaagcagcgcgtaacgcgtatccgaagccgtctgtatgaattaaaggcggaactgccgccggaaaaaggaggaaatgcataatgggctgtcttggaaacgttttatggtctatattcagaggatgtataagcgggctgagctggcttctgacaggctgcctgtggtgtaacgatcatagggattcacgtagggctacagtgcttcaaatttgcaagcctgagctttttcccctttgggaaagagggtgtatacggcaggggcgcgggttcctttctgttgaatatcatctggcttgttgtttcaggcctgccccttgccattgaatcggttgtcataggcgccctgctctgcatgacggtcgtgggcatcccctttgggctgtagcagttcaaacttgcaaagctggcattgatgccctttggcagtgaaataagatagggtgtcctgcatcctgtcatggccggtaaaaaaggcaggacatacagaaggatttctgctatacaaacacaaaaggcagaaccgggcaaaagtgccagtgtctgcccggttccctatatgatatcaggaagaagggtgtgtatatgcccagaaacataataatggacgatattgccgccatggcgggcgttacaaagagtacggtgtccaggtattttaacgggggaagcgttaaggagtccacagagcagaggatccaggagattaccagggagtacaacgatgagctctatgcatttgcaaggctgaaggcaagggagagtaatgtggtgggcgtggttgtgcctatcttaaattccaagattaccagccggatggtcaccagcatcagacggtatctgcgggaacaggggtatgaggcccttattaaggattcggaccacagcattgatttggaacttaagaatatacagagactgattaatttaaaggtggacggaatcctactgagcgccatcaacataacggatgaacacagggaaatcatcaggaacagcctggctcccctggtgatgcttgcccaggattacgatgatgggatatgtgttgtatatgatgattatggggcgggaaaggccatggggacctgcgtcggcaggggacctcctgacagggagggatacatggggggctgaatccgatgaggcagtgggatttaccaggaaaaagggagtgcatcagggagatgtccggggattacaactatgaaagcgggatctgtatggctcaggaactgctggaccaggggcctcttgatacggtcataacaaatcgtgaaaaagatataatagacttattagagattgaaaagttaggaaaagccctgtgtctgttataattaatcaacagcaattagcgaatgatttttatatttttgaaaggggaaagataaaatggaaaaagtattagtgtgtcaaagttgtggtatgccaatagaaaaagatgaaattattggaacaaatgctgatggtagtcaaaataatgactattgcgtatattgttttaaggatggaaagtttacagatagcacttctactttagaagaatatatagaatacagtctacaatttgcagaacaagcgggcataactaaagaagaaatgaaagaagactgcaaaaaagttttaccaactttaaaacggtggaaacaaaacaaagaattgtaatatacgcaaaataaacatactgccataacaagggggtgcggggaaattttattccccgctgttttctttttgtgtcgttaggtacaaaacgccgtcttcaagaccgtacataccacatacaatgtggtatataagtgcgcccttgcttttagagcaagggtaggggcgcaagcctgttacctttgtgctgcgtccccgtcctcgcggttctcctgcgctatgtaggcggtttgtgtggcagatacgcgccggttccgcgcccagccttttgcatcgtctgggcagtcaacttcactgtctatggtggacggggcattgaaaagcactgcctttaacggtatctttcccttgccatgctcaaaacgtgcctgcaaagccttgtaaatcaagactcttttgcccctataacatgaaagtaaaaattagtggcgttcctgttctatcgatgtgggaatgagaaacgccgccttatgcggttcgttattctatttcttcggtaatgaggtcttgaatgacttcgccaaactctgccgtcatagagaaaagaaaatattccagtacgtcggggtatgtgtccattggcttggctttctcggaaaaaggcaagcccataagcctgtaaagtagcttgatgaattctgaacagcttcctgcggtcagcggggatattcatggtaaagattacgtccgtcaggcggttcatggtttccatgtcgccgtctgtcgtgacccatgtcatttctgcggatggctacgtgattgtcccagcgccaaggcttatcttgtccttgttgatttctccggacgtgagtgatttttctctatcaaatcaataaataacatccaaattagcggagtggcttctggcggctccgctggctttttaccctatgttcaattatgaaagtctgcgtccggtctgccacgtctgtaataatgattttggcagacagactaaggcggattattatcaccgcgccttaggaatttcttaatcatttatttaccattccataaaaaatcaattatttcaaattaaaaaacttcctgctcatcaatggtatgcttaaactgcctgatagagcaggcaatatttatatgaaaggaggtaattttagagaatggaggtggctatgagaaagaagataagacggattattacaattctgggaacaacagcaatgatttttaccgtaacagcctgcgggaaccgcatggatgccatgcagccggattcttcttatgttgcagacttttttgatattccggactcagtgacaggaatcgaaagacttctgctcaaagatgatatggcctatatgtgctgtctggaggaagatggcacgtcctatctggcagcaatgaacattgatgacggtaaatttttgaaacagaatctggagctggatgcctcggtttcgcttctggattttggctttgccccggacaacagtatctgggcggtttgcctggaacaggccggcgtctatagtttaaggaaatttgacaacagcggttcacaggttcagtcggttgacctggcaggtgtgatggacacctcagtcatatcggcagttggaagagatttgttcctcagcattgatggagagggaaatatctgtgtggctgctaaaggcagaaatacgttggtctatctgttcgacaataacggcagtttcttattttctctcgactatgagggaaatcttatgacaaccacaacgactgccgggggacagattggtatttgtgcaacttccccggaccgtatgaactatgacctgctgacagtggacatgaagagccgggattggagtaaagataaaatctatctgggcgcagcagcagggctgtacggaggtgtgaacaaagatttctatcggtttaattcttccgttttgtatgggtatgcagcgggcgcgcaggagggcagcccggtctttaactggtcggatatgggacttggcacatcaggggttcatcttggagaatgcacggacgggcgttttgtggtcctggcagcctcatctaatcagactgaggtattatcatatgaaatggcggttctgaccaagggggtggatgagagggagattttgagtatggtgagcctgagcgcgacccctggccttgttcaggccgtatccgattttaacaaaacaaacgacaggtataaggttgaactgacagagtatttcccgtatgaacagaatgtttccaatgaggaatgggataatgccattttgaatcttaatacacggatcatctccggtgatataccggatattctggatatgagtaatctgtctgtacagatttatcaaagcaaggggctcctggaagacctttatccatatatagaaaatgatccggaaatccagaaagaggattattttgaaaatgtctttgaagcgatcagcctggatggaaagttaccttatcttacaaacggagtagccgtatccactatgctggccgacgaagatattgtggttggaaacgatggctggaccgttcaggagctggaaaaggtccttgatacttacggggccaattccatagacaatctgtccggaacttccttcctgaaaatcatgcttcggacagatggcagtttcattgactggaacctgggcaaatgctcttttgattcgcctgaatttgtaaagatgctggaatttgccggtaaaatacaggaaagcagccagaacggcttcgtagggatggaaatgaacgatacctatgcagcagcctatgaaactgtgctgagcgtttaccacatcgctcagtatagaaattactacaacgggaacgtgaggtttcttggacttcctggaggcggtggtgtataccatgcaatcaaaccggaagtgaaggttggaatcccctcgtccagcatccagaaggagggggcatgggaatttgtcaggacactattgacagaggagcatcagatgtcctgtatgacgcttccgattcatcagagggcgtttgataaggtcacacaggcggcggtggctggaaaatccatctggacgtggatttacgaagacggtaaggcaatagaaaaagatgtggagctgacaaagcagcttttaagcagcgcagcctatgtagagaatgacaatcagacgctggaatcactgattttggacgaggcccgggaatatttttcaggggcgaagagcgcccgtgaaacggctgaaagaattcaggaccgtgtcagtctttatatcaatgaacaaatgtaaaagttttatatatgcaatggaaaggaaccaaaactatgaaaagacagttcatgaaaagaggaatgatggggatatatgcagctatctgtgcggggatgcttttggttaccggatgtaatggtacaaagtcaaatgtaaagacggaaactgaaagaattgaagtggcagagcgaaaggaaagtattcctgtaaatattgtcagtaaggaggataaggacgaagtccccgagaagcaggaggaagcggtccaaaatgattcgcctctgcaaattcaggatgatgccgggaacggggattcagatacaatggatacctttgcagatgcgaatgacatgatgaagtctgctgatttgagcggtacagccggcgaatgctcggataccgggtgcgtgattaatacatcgccctttgcggacggcacttcatcttcaggagatgggggcagcatgacggttacttatacagaagacacagtatttcaaaagggaaccgtgaaatcggatggcagcagctactctttggaggacagtgaaaaagacaggataggggacagtgattttgtactgtgtttcgggaaacagcaggcggacggttcttacctggcagacagaatcattatgattgtgttcaattaacctgataggagatgatacagctatgcgtttacatattggggaaaaaataagagaacaaaaggccatgcccatttccggaaagaaatacaggcccctcatagaagaccgtgtgcagcgcatggctgtatatcttatgattggattttttacattcatgttagtatgcacaattatttcccgtgtatcgtattcctttactaccgcccatgtttcggtagcttcgatggcaggcaaaacgctgatgaacagggctgaattggaggggattatctatgcgtcatcggagaaagggattagtcttccggatggccttaaggccgtttccgtcaatgcagggaagggcaaatcagtagaaaaaggcgaagtgctgatagaatttgatgtccctgccgcagaagaacggattaaaaaactggaagaagaaatccgtatccttaatcttaaattggatatttcatcaaacaatggcggcaatgatgtgattgaggcacagcgtacgctggaggatgccaaaaaggcgtatgagcggattgctgcgaagtatgccagggcagagatgcggctgaaagaagattatacaaagcttgaagaaacactggcggatgcggaaaagaatcttattaataaggcagaagcgcttgtgaaggaagcgagggaaaacctgcaaaatgtaagggaggacgcggaggacgccatccgtgccgcagaacaggcgctggatgaggaatcagaaaatcttgatgattcagaggatagttatcagcaggcattagaagcgtatgagcaggcgaaagatgaacttaatatggcaaatcagagagtcagcgaaataaaggaagcgattgcagggaagcagccggatgatgccacggattatacggaggagctgaaggaggcggaggaggaactttccattgcgcaaaaggcatttaaccaggccaaaaaggaactttcaaaagcagactataactcatcgtcctatgacagggcagacgataacctggattccatcaagcgaggctggaaacgtaaaattgataaagccaaagatgctctttataaagcagaaacagtgctggaagcagtcagggaaggaaaagatttttcaactgagtctgcagtcagtgaggcccaggctgccattgatactgcaagagaagcgttaaaccgtgcccggcgtgagtcagaggataaccaatattctgaggaggaagaactttatgctgcgggaagggcagttgagaccgcgcaggcagcattggaagatgcccggagacaggctgaggtattgcagaaggaaggtgagattgacagaattacctgtgaatctgagcggtcagataaagagaaatcgcgtgctgcattacaggaaattctggataatgggggacgccttttggctccggcccctggaacggtggtgaggacgctggaacgcggggataaaacaaaggagggggaggatgcagtcattctttcctctgctgacagaggatttgtttttgaaggaaaactggataaagattcagcgcgccgcttttcagccggggacaagggagagcttcattacaaattggatggaagcacacaaaaagcagatgtggagattcattccatcagcacgccggacgagtcggaccaggttttagtaactgcggttctgccggagggaggttatacttccggtatgccggcacagctttttctaagcagaaagagcgagacgtatcaaaattgtctgcctcttaccgcactcagaagtgattccggcggagaccacgtattcgtactccgcagacaaagctccgtactgggaacagaatgggtcattgcaagggtagatataacagtaaaggaaagagacagtcagatgatgtatgttgacggtgcgcttacgtattcggatcaggtagttataagctcaaataagatcatatcggaaggagacagggtccgcattgaaaattaacaggtttgctcattaccgggcgttgacaatatcagcaatactggcagcagttctttggagtttcgcttgttctttctatagtacggccatcagtcactgcaccagtgttggcattaaatgggaaaagggcggtgtcagcccctcagagcttatcaggcagcagacgtatgcaaggcaggatggagcaggaaaccagccggaggtcaccttatggcagatatatccggaacaggagataatggcttcagataaaaaggagatgaaggcggatatagttgccgcctttggagactgcggggatgttgtctcctccatgccggctgacggagcttatccggccagatcggatgcctctggctgtgccgtcagtaccggtctggcattctccctgtgggggagtattaatgtgattgggttgccggtaaaggcggaaggaaagcagttctatgtccgcggcatatttgaggaggaagaaccaaggttattcttacaggcgcaggcggaatcggaagaacccttatccaatatgcagctgacgtttacaggtccgggagcaggggagagggccggtcagtatctctcatcggcaggttttccggagggccggatccttgacctgacattatttgcatgggtacttggcatgatactccggctccctgcgatcattctggcaattggtatccttgggcgcgtgaccaggcatggaaaaaggctttgccgttatcccctactgctggctgtttattttttaatcgctttcggtatattggccgtattatggttttgtatggatctgcctgagtttccttccgagtttgtccccacaatgtggtctgattttgagttctggggaaatctgttccaggagcagggaaaaaatatggtctcctggatggcggccgggcctgccttccgggatatggagctttggacctcatcatttatggcagtgctgctttctgtgtgtgcctctgcctttacggcagccgcagcaatgctggtatccatacgctcttacaaaagaatgatgttctattgtgcggcatatacactgacactttgcctgttttcattcaagatagcctctgctcacaatatgaccttttgcaaagcgatgtatcttctgccatgtctttggatatgtgtggattttctcttttactgtctgaaagaaacacttgccgccgatgtccgtgaagggaggattatggatgaagaaaaaacgtgaatacagtgttccgatccgggaacaaatggtaccatggctgtttttgctgccgagcctgctgttcgtgagcattatggtgctgattcctatgctggacgctctgcgccgttcctttttcctggctgccggtgaccggtttgtgggatttcaaaattatctgtcagtcttgaggaaccatgcgtttcagctggcggcagctaatacagccaaatttatcttagtctgcataccgcttctgttactcttttccctggctgtttccctgatgctggcctccttcagggaaaagcgcggcattttcaagacctcgtttcttgtacccatggcggttcccgttgcttcgattgttcttttgtggcgtgtgatttttcataaaaatggacttctcaatgcatttactgcactttggggtttggttccggttgactggattggaagtaaggccgcctttggcgtgttggtgtttgcttatctgtggaagaatttcggatatgatatggtgctgtggctgtcaggactcagcgccataaatccggcattatatgaggcggctcagatagacggcgccggaagcctccagcggtttgtgaggattacgcttcccaatcttatgcccacattatttaccattaccgtgctgtcgctgctcaattcctttaaggtgttcagggaggcttatctgattgcgggaggttatccggatgacagtatttacatgcttcagcacttattcaataactggtacggcaatctggatgtggataaaatgtgtgccggagctgtgatgatggcaattctggtatttattttaatactactgctgcaaaaaattatgaacagaggagataggatatgaaaaaatggcttcttggcttgccccttgtattgatttcggtctttatatggctgcctctttggatgctgatatccggtacctttatgggaggggcagagctgtctgaaaatcttgcgcctgtcctggagggcaggggaggaacggctgtatggcctgtaatggcgcgttatccgactctggcggcatatgtggaactattattggatacgccccagttttttacggtattctggaattcctgcaggcaggtttttccaatcatactcggccatgtccttttgggcgcacctgcggcatgggcatttgcaaagtttcattttcgcgggaaaaagatactctataccttgtatattgtcctgatgctgatgccatttcaggtgaccatggtttccagctatcttgttctgaacaaactgggcctgattgataccgtgtgggcagtcatactgcccggtgcggcatcaacgcttccggtattcatcatgacacgttttttcatggacataccggaggcggtcatggaggcggcagccgtggatggggcttcctcatttcagacttttttacgatttgggcttccgctgggagcgccgggcattctctcagctgtggtattgggcttcttggaatactggaacgcaatagaagcgcctcaggcattcttaaaaaaccaggcgctctggccgctgtcattatatatgtcaaacatcacggcggataacgccgggatatcattaattgcatcactgattacactgatgcctcctcttttgatattcctgtccgggcagaaatatctggagcagggcattatatcttccgggatgaaagattaacacaggggattaatatatggaaaacaggaattttgcaggcgatctgcagataagcaaagtgaataaatggtatcctggagatgttcatgctgttaaggatatggatatggaaataaagagaggggaatttatagtatttgtaggcccttccggctgcggaaagacaacgctgctgcgcatgattgcaggacttgagagtataagcagcggcgaggtcattatggacggcaggactgtgaaccaggttccgccaaagaaccgcgatattgccatggtattccaaaattacgccctttatcccaatatgaaagtaaaagataatattgcttttccccttaaaatgcagcatatcggcaaaacggaaagggagaaaagggtagcagaagtggcgcaaaagctggagctggatgctctgcttgaaaggaaaccgggggccttgtccggcggtcagcgccagcgtgttgcccttgcgcgggccatgataagaaaacccggactgtttctcatggatgagccgttagccaatctcgatgcgaagctccgcacagaaatgcgcagggagattataacgctccaacgggagctgggggtaacaaccatatatgtcacccatgatcagacggaggcaatgacgatggggacgcgcatcgccgtaataagcggcggtgttttacagcaatttggaacaccgcaggaaatatatagaaatccggcgaatctgtttgttgctgggttcataggctcacccaatatgaatgtgtgggacacagagcttatttcaaataacggacaacattatctgaccctgggaaatgcccgtattccgatgggtaaaagcggtctggccgcaagaggactgcaggggcccattaaggcaggtatccgtccggaacacattgtgccggctgcaccggacgatcctcatgcagtgcggatgaaaatcagcattttagaaaataccgggcgtgaagcggcagttttcctcaccggggctgatataccggatatgacgatggtaacaggcgcggatttctcaggccgggccgggcaggaggtatatattcggctaaagccggaaaagatacatctatttaatacagagacaggatgtgcatatggagatgtttatgtatagaatatattcaacagggatagaaactgcggctgcatcagcgatactgataccgattctttttttatatcaaatatttatatttcataacataaaaaagacggcagcctatatacttttttcattatatctggctgcaatatgctttttggtgggatttcccaatatagcagggatgagaatcgttttatctcataactttattcctctgcgtgggatgttgaccgatataacgaacagctatctgaatgttttgctttttatcccattaggtatatttgttccatgcttatggcccgaatacagaagtatgatgaaaacagtgggcttgggcctgatgacatcactgggtattgaaatactgcagatatttacctttcgcgcaaccgatataaatgatgtgataacgaatgtggcaggtacaatgataggatatttaataggaaaattgattattaatcggtttccacaattaaactggcttggctgcaaggaacgtgagttatatcttttatatgtaacggttggcgtagtaatgtttttttcccagccgtttattcagtctgtattaggtaatttctctttatagggaattgcctggcagcacaggagatgttacaatgataaaaaacaaggaaagagggaaacacaggtgtgtaaaccgtttagggagatagcatgaaaggattccatcgacaaaataaattattttttctctctggattgaattgtgggctttgccctatgtatttgaataaaaattgtcacggttgtggttgtggtgaggaaaatcactcatgtaaaatagcaaggtgcagtatggaacataatggaatagagtattgctttcaatgcaatgaatacccctgcgaaaaatacgagaagatagacaaatttgattcttttatttcacatcgaaaccagaagagcgatttagagaaggcccggcagattgggattgaagcttacaatgcagagcaggaagaaaaggtagaaatactgggcgttcttcttgcaggatataatgatggccgtaaaaagaccttattttgtgttgcagtaaaccttctgaagattcatgaactgagagaggtacttggaaaaattgagaacagatccgatttgggaaacctgacgctcaaagaaaaagcgcttttactgcttggttgctgaaggcggaagcagaaaagaataatattgacttgaaactgcgaaagaaaaagtgagaatttggatacagacatcgttcattaatggatagtgaggaattgagaatcgaagtgagttcatcgaaatgtatccggttcttggaaaggacagaagaagagaggtgtatttttggtaagagagtatctgcatatgaatgtttatgatgcgtttttagcgcggatgcattttctctttgaggagtttgatcatatctatgtctctttttccggaggcaaggacagcggtttgctgctcaatctggttctggattatcggaatcagcattatccggaaagggccattggcgtgtttcatcaggactttgaggcacagtatacggtgacgactgagtatgtggaacgcacctttgaacggattcaggatcaggttgagctttattgggtctgcttgcccatggccaccagaaccgcattaagcagctatgagatgtactggtatccatgggatgatacgaagaaggaactctgggtccgggagatgccacaaaaagaatatgtcatcaatctggaaaataatagaatgactacatatcgttaccggatgcaccaggaagatttggcaaaacaattcgggcgctggtaccgggacgcccatgacggcggaaaaacagtatgcctgcttggaaatcgggcagatgaatctttacagcggtacagcgggtttttgaataaaaaatatggctataaggatacctgctggatcagcaaacagtttaaagatgtctggtgtgcctcccctttatacgactggtctacggatgatgtatggcacgccacctatttatttggttatgactataaccgcctgtatgatctctattatatggctggactgaagccctcgcagatgcgtgtggcctccccgtttaatgactatgcgaaggatgccctgaatctataccgcgtcatagacccggagatttggtgcaagcttgtagggcgtgtacaaggcgcaaatttcgcttccatttatggaaagagcaaagcgatgggctaccggaatattactttgccagaggggcatacatggaaatcttatacgaagtttttattggatacactgcccaaaaggctgcggaataactacgctaagaaattcaatacctctatccagttctggcatgggacaggcggtgggttggacgagtctgtaattcaggagcttcaggagaaggggtatcaaattagacgaaacggtgtttccaattatacattgaaccaaaaatcacggattgtatttgtgggacccataccggatcacacggacgatatcaaatccacaaaggatatccccagttggaagcggatgtgttactgcattttgaaaaatgaccatatctgccgcttcatgggatttgggatgacacggcagcaacagaaacggttggatatgatacgccgtaaatacaaaagtatagaggaattcgattatgaagtataaaagcccagtttataatgtgatatctgttccaatagagaaggtacggcccaataactacaatccaaataaggttgctccgcctgaaatgaggctgctttatgagagcatcaaagaagacggatatacgatgccggtcgtatgctattatgtaaaatcgcaggatatttatctgattgtggacggcttccaccggtatcaggtgatgatggatcatccggatatctacgagagagaacagggattgctgccggtttctgtcattgagaaaccgattgataaacgtatggccagcaccgttcgccataacagggcacgaggcactcacgatgtggatctgatgagcaacatcgtaaaggaacttcatgagtttgggcgatcagacacctggatctcaaagcatttgggaatggatagagatgaaattttgcgtctcaagcagattacaggtcttgccgcgctattcagggatataaaatttggagaggcgtggcgccctgtagaggaagagacggaaaaagagtaaataatattaatgagtgaaagtaataaacgccctttggcagaaaaataagtgatgttctgcaaagggaatcagatattaattatggaggtatgcttgcaaatggataaatggttcacgattgatcagattgatgaagatacatatattatcagcgaataccggcattgggaggagacgcattgctatctgttaaatggatccagccgcagcttattgattgatacgggtctgggaatctgcaatatttatgatgaagtaatgaagctgacaaataagcctgttacggccgttgccacccatattcattgggatcatattgggggtcataagttttttccggacttttatgcccatgcggaagaattgagctggctgaacggtgagtttcctctgacaatagaaacaatcagagagatggtggcagaccgctgcgatctaccagacggttacgatacaggcacttatgagtttttccagggggcgccaactaaggtactggaggatggagagaacatcgaattaggtggacggaatatacaggtattgcatactccgggccatgctccggggcatatgtgtttctgggaatcagacagaggttatctgtttaccggagacctggtttacaaggacactttatttgcctattatccgtcaacagacccggacgcataccttgcttctcttgaaaagatttcggagcttccggtcaaaaaggtttttcctgcgcatcatagtttggatattcagccggagattttaattagaatgagaaatgcgttcaggcagttacgggaagatggtaaattacatcacggcagcggtacatttgactatggagattgggcagtatggttataaagttatacaaaaggctttatcagaaataaagaacagctatagattgaggagcgtttatatgaagtatgtatgtacagttatatcggtagcggacatcagcgccgcaagaaagttttatgaggaattgttcgggttagaggtctatcaggattacggaaggaatatcgcttttacctgcggtctggcattacagcaggattttgactggctggtaagtataccaaaagaaaaggtattgaagaaatccaacaacgcggaaatcgtctttgaggaacaggattttgacggtttcctgaataagctgaaagcatactcggacatcgaatatttgggagaagtcattgagcatagttggggacagcgtgtaatccggttctacgatctggacgagcatctcatagaggttggagaggatatgcagatggtagtaaagcggttccttgcttctggaatgactatggaagaagtctctgcaaaaatggacgtatccattgaggatttaacaaaacttctaaatagctaatgtgcagcgggcatataaataaattgaaattttgaggagagtaaaattaaatgttagacaggacgataccattttataacactattcttcggtgtgatcgttatttaaccactacaccagttttgcataatggatatgaattccgtatgtatcaagatggagatgagcgaaagtgggcacaacttgaatatgaaattggagactttgattcagttgatgaagcagagcagtatttcatttcaacttattgttcaaaaaaggctcttgatattacagaaagatgtgtatttgtagtcaatgaaaaaaatgaaattgttggttcttgcattgcgtggaaagaattaagaaacgatatattggttgcttccctgcattggcttgttgtttcccctcaatatcagggtaaaggtattggaaaagctctttgccagaaggttatgcagattttcgttgtaaacgatgagtttccagtatatatccacacccaaccatggagttataaggcaatcattttatatgttcgacaaggatttaagattcaaaaaacagacagtttttctcaatatgaaaaccaatttaactttgctatgaatactttgaaaaaaatattaccggaaaatcaatatgaggaactgacatacaatatcgaattataaattctttaggttgtcgtgagtagcacaacaacaatcgggatgggcatctcatagaggttggagaggatatgcagatggtagtaaagcggttccttgcttctggaatgactatggaagaagtatctacgaaaatggacgtatctattgaggatttgacaaaacttctgaataacgagaaaaaataaaattttcaaatatgctcaaaaacagaggaggataaaatgccatatacatttcaatcagtgaaaagcatggaaatattaacagatagcagtaaactatataatttcattgaagacttttcagattatggaaatcagttttcactcatatgcggtaaaatcaaagcgctatttggtcaaccgatttatgaaacgaaaaatctggagaatcttttttcatactgtattctggcgacatcggaagaagcggaagaagtttacttagatatttactgtgcaggctcaggtcttgcagttggcggtatatcggacgaaaaatccagaaaggcagcaaaggctttagtagattgtgttcgacaagcaaaagcgattgactacgcacataaagcttacaacttagacggacctactgctcttgaattcggaattaaagatggtaccccttattataacgaaacagagttaagtctttcggagaaagaatttagagaactgtttttcaatatgtacaaaaacggggatgcaaaataaaaaatgatatgctgaagaatttgaatgggaaattggagttatcggttttctgcgcgggaatcatacagaatgagactatgattgagtatgcagcacaaaaccaacatgaaacagaactttactcaaagttcaatcagtattatgggtaatgattgcatactgtgggctggattgtggaaaatgcgaggcatatcttgcaacaatcaatgacgattaggtgttgcgtgagaaaactgcaaagcggtgggccgagttaaataatgctcctattttgcctgaacatatcaattgtgaaggatgtcgtgttgatggaattaaaactgtattctgtgatagtctttgtgtaatgcgataacttcaggtttgtcggtaagtgtaacacaacagaggtttggaggggcatctcatagaggctggcggggatttagaaaagctgccgtgtagctgagaaggaaagaaaataagaagttgtgtggcttgaaaattgtaagttgtttttatgcgttcttggcgtaaaaaggtgtattttaaattgaaaggatggtcgggtgctaatgaaagaaatcatcaacttcattgaagcgaatgtggatggaaaaacgctgtttacaaaggaattagtttacgaacttgaaaatggtgcgttacagggcgtttactcagatcaaatatctttctctaatctaaaatattctcagagcggatttcagttagatatgtttattgtatctaatgagaagatatggctcatgggaaaggatggagaacaggaaaaattgcgaaaagatttcagtggtgtatccctgttccgatttgaactagcggagcgaaaaagcaccaatagtttgactggctgttttcgtttcatttcagcttcagggaaaaatgtggcagcagaggctatcgtaagtggaatttatgatgtgcatcttgaaaatgatgtgctgaagttatcggaagatcaggtcttgtatcgggatcagccgatacaagaagggcattttaagcctgttgcatttcaatcggaacatcgtttttatgttaaagctaataagctacactatgaatacaacggcaagtgttttgatgtggactcaaaaactatgcggcgtaacgatagctccgatacctttcctccatttatttcaagcgaaaagtaagaaatgacgaatcagtttgaaaggagcgcagagatggatgttaagaaattttggaatgcagttttatggcaaggttaagatccggccttatttcaagcaaacaacctatataaattggcattgcatcattgagcatttttccgttgaaaagttgaacccagaattccccatgaaatagtcgaagcggttgcgattctgacgcatgatgagtctgttaaatattttgagtatataaaagggattaaagtaaatcctgttgcattaaaagtcaaattagcaggtttggctcacaattcagatggcagccgatggatagggaccatgcacattgtagaactggacttcaattaacgaaaagaaaggtatttgaaagcaaagtaattttattaaatacgctaccttaaattagataatgagtatttttttaaaaagtgtaaatgctccatagccagtacctgactaaaaataatgccgccctttatggacggcagatataaataaacttgatcagctttcagtttcctttttctggtagcagcatttcggcaatgtctcggaccacgggagcagctcttcgacataggacagctcttctaattctccatgttttggaagctcttccaaaaggtaacggaaatattcatagggtttcaactgatttgccttcgccgtctcggcaatgctgtaggcgatcgcacttgcttttgctccgctgactgtatcgatctggaaccagttgtttcttccgactgtaaatggtcggatactccgttctgcggcattatttgtcatcggtacataaccatccgtcagaaagacacgcaggaatgcttcctggttcagacaatagctgatcgcttttccagtggcggattttgggacaacactgccttcttttgatttaagatacgcaaaaaaggcatctgccagtggcagtatatggtggatacgtgcttccagacgttcggcgggttccagtttggcaaacttctcttcacatcggctcatggtctgtataagctgaaggcttttataggcaactgactcccggatgttcagatccttctttccggcggcttttactacatcggcaaacccacggcgcgcgtgcgaccagcatccggagattgtcaggtcctctcgttcatccgcaatggaatggtatacctgataaccatccgttacacagatcccgctgaagtctttcaggaattcacgggcatgctcctttttccgggtcttctgaaattcgtaaaggatgaccgggtttgactccagttcaccggaacggtacacccacatccggctctcagctcctgcaggacgtccatccttgcgtacctctaccacggtttcatccgcatgcatcacatgatactccggaagtttttgtttcattcgggcgtatacacggctcaggtaccgttccgctcccataatcgcccagcggcacagagtctgtgtcgggagaaatacatcgctgcgttcaaactctttggaaaggcgttcgatcggttgcgcatttacatacttcaggttataaataccagcaactagggacgcagtagccagactgttccggaacagatcagctggacgctctgcgcgcgcaaagtttccgccatccgcacttacatatacctccacgtgatgttcaatcacttcgaagcttgccggatggaattccagacgtttatatacttcgtccggaagctttttgtaccggccatccggaaatgcggtaagcagttcttcttccgacagggtatggataaccacagtcaccggaacatctttgatctcttcctgacgttttcctgttttcttttttccacgtttgtatggtttcgggaagatatcctccaattccggttcagggaatgccggatccagatctatggtcatctctgcctcattgaaagcgaagcagagctggctgcatccgtcttccccgatggtcagtcctttttctgaggaacggccaaaccggtgctggcgaaggtttacaacttcttctgtcagaaggtttacgcttttctggagctgttcggtagcctcaaagagtttctggttggactcggtggctgccacgagcattttgatcagtgtttgtttgtcaaggttcgcaagttctttttctttaagcaaaaatgccatcgcagtatccctcccttccgttttctgagggatagtatagcagaaaaagtcggttctgcatagccggtcagccgatttctgtgcagttacattcctgaatagaggaacgttccagtatcgtcattccggccaacagaaggtgaagttcttcaggcgagatccctgcagcttcttcctgacttctcggccatcggaggcgtccggcttcgatccgcttataaagcaggcagaacccatcgccttcccagaccaggcctttgaaccggtcggtgcggcatccacagaaaagaaacaggacatccttttgaaaaggatccagatggaactgttcctttactaacgttgctaaaccatcaatccctttgcgaagatcacattttccacagtagatatagatggcctgaaaaccggtgttctcagagagcacggaacatcacctctttcaaaaaagagaggatgcggtccggtgcatctctgctcacttccataacagtatcaccacggcgaatgcggattgctgcatttgaagtctgtacagtagaagcaactgatatctgcgcaaatgtgccagaaggatcatgatcctttgtaggatccggtgtttcacaagcattcaatgccatttttctcaaccggtttagccggtaataatagactgactcctggattccgttggcggcacaccattctttgatggtcagaccgctatcgctgcgttgtttgatcattgcggtccaactggccgcacgaacctgcattacttcattcatacttgaaatctcctttgaaacttagaaaactccagtcaaagtttatggagttttctaagtagatttgatgagattatcatcacataaaatcagtcgcaagtcagcccacggattatggagcatttactaaaaagttggcttataacaatttaacaaatcgggatttggaggaagaaataataatgccgagtttagaagtgaacatagaatatatcgagcaacaaacaatatacggattatggcaaaagtcaaatgataaaacaatttccaaagatataaaggctctgtctaaacagtatcatgccgtggtttccatgccgaaggggaaggtgttaccctattttgttctgtccagaaattacaatgagcaaagccgcgattttgaattgtttattggtagtgtgaatgacaagaatagtttagaaagctacgtcctcccagccagcgagtacgccaaaatcacagtaaaacctaaattgggctttttgtggggtgcttctattggagaggcaaaacaatatttctatacaaaatggctgcccacaagttcctttgaagcattaaatttggaatatgagtatcacacagaaagaagtacggaaaagcagccggcgattgacattatctttgccattcgacgcaaagctatcaattaaaattagaccaattataatttgtagggaaattgaacatagtgattttgctcaatcgatatttgaaaggataaaagtaaaaatgatttcttcaatttataacagacgaagcacacggtaattcatagataaacctatatctcaaaaagatattatagatattatccaaagtggaataaaagccccttcttctaaaaatagacaaccatggaagttcgttgtgatacaaggaaatgctaaggaaaacatgataaatgttttcaggttgggaatcgggagagaagaaaacgatagcgcattgttaccgcaaagcagacaacacatagcttctgcaaaatacactattgatattatggcagaagcaccaaccatagtctttgttgttaattcactggggaaaagtattatggaagaattaacaacagaagaacgtgtttatgaaatctgtaatattcaatctataagtgctgctatacaaaatatgcttctcgccgcgactgagaagggaataggtagtctttggatatgtgatatttattttgcatatccagaactgtgtaagtggttgaatagtgacggacaacttattgcagctattgcatttggttatccaaatgaatttcctaaagaaaggccacgcaagaagattgatgatgtagtggagtggagaaagtaatttgtcagaataataacttccagtttgttgaactgaaaaatttgaattgatttatctgcaatgaatatgaaaacaaaaggacagaaaccatatgaaaacaacacaaaatttaatgcgggtgaaggagctattgcttaccccacccacgttttcagataataaggctcgactgcaaacgaatctggatactgattttctcaaactaatcgccattgtttcaatgctcatcgaccacatcggcagcgtctttttcccggaggtaagggtgctgcgttggatcggacggctggcgtttccgattttctgttattgcatgacagtgggcctgctatatactcatgatatcaagaaatatttattccgtttgggaatatttgcactgatttctcaaccctgttatatctttgcctttcatccgtatgacttttggtcgcagtttactaactggaatatcttctttactttgtttctatgccttttggcgatgtatggatggaaagaacgcaaatggtggctgttcgcactgaccttttttgtgatttcatggtggaacttcgactactccagcaacggaatttttttgatgctggtgttctatctttgccgcaacaatccggtagtaggggccatgttctatctgctgtttacagttctgccagcgcttttcgcccgccccggtgattttcggaatctcaccttgggtggtcttacatttgattggacttttgcaatggcctttgccgctttgtttatcttcccctgtacccatacaaacctgaaggttccacgttggttattctatgccttttatccgattcatttgctaattattggcctagttcggctggttctcaaggtataatgttaagctttgtcaattcatgtttgtcgtgttctttcaaaccttattttcttaaccctttaaattaagaagcatggtttgcaaaactctattttgcaaccaggtatttgatgcctatggaggaaacgcatatggatattcagaaaattatcagtttagtaacaaaaacgcaagggctaattaaaaaccgtgaaatggccgctcatgtaaaagagaaaggtcttgcagattatgtaacgcaggtagatattgccgtacagaatttcttaaaaaaggaactgtttgcccttgcgccggatattcaattccttggagaagaaaccggattgcaggaaataaaagcggatagcttttggattttagaccctgttgacgggacgacaaaccttatgcacgactatcagcacagcgttgtatctttagccctttgccgccagggggatattattatgggaattatatatgatcccttccgcgatgaagtgttttctgcaattaagggaaagggtagctttctaaatgggcagcccatacatgtatcaaatgcaaaaaaactatctgacacaatgattgggctgggaacagcaaaaagagaagtggccgatgaaaattttgcccggttccgcagggtgttcggtcagtgccaggatgtccgcagaattggctctgccgctctggaactggcatataccgcctgtggcaggcagggaggctatttcgagatatacctaaatccctgggactatgcagccggcatgcttatgattcaggaagcaggaggcaaggtaactgattttacaggagaaccgcttgaaccgaaaaaggggagcagtgtggtgggaacaaatggatttattcatacagaactgttaaagttactgtaagctatgtgtccacctgggtaccctgatgtaggagaaggttagcttgtgggtatcatcttctcgaagcaaaaaatcagaagccagtccagaaagtggtggaactaacaatgttctattcaattctcggaaaatgcggactttaatgtggaggcggtttaccaattgcaagagccgcgaacatcctatcagtcatggctaatgtgactttagataggataagattctagctgctggtagtcaggtgctttgttgtgtggaaactattctgtccttagggaggaggagaattataatagagtactggagttcctttgagtctcatttcctttgagaatttgaacagatagagcctcgttgaaaatcctatagtatactgactaaaaaaatgtgagcagatgactattaggataatttattaagcctgagcgaattatgagaccgtgtgtgcagttcaaatgttatgatgattatctaaaattggcttatcaaagagcgggctggtaatctgtttttggaggcgttatgaaaggctttgagagacaaaaccaactgctatccctctatggattgatttgtaggctttgcctatgctattaattaagaattgtcggtatttcttacgggtgttgtagaaaaagcagcgtatcaaaaaccaataaattagctgatggtctggactcttcaagtacattacctctttatggatgatggacactattttattaagttaatatagaaccggaaattaaacataaactattatccctaaatataaaggtatataacttagagaaaggaagagtagcaaagagccaaagacttaaagaatgcgatatagcaaaaagccaatatcaacaattctttttaaggggaacagtacaaagctgttcctcttttgttttcaaaataacagtatacaccctcatgagcaggggaatatataggacaaaggtccgtggcccaccatagtctttctgaaaagagataattctacattcggagggactatgaaagtgaaaaagaaagataatatcagataccgttttacggggtatgtattagcagctttaaaacgtgccaagagagattacatatgccgtgaaataaaaataagcaatcatgaaagcccgttagagaagctgcttccagaaccgttgtgtgatataacggacagtaagccatttttatgggaagaaacggagcagattccactgataccggatgaagttcgtcagtatatggaaagccagattggtgagtcaggagaaacggcgcttgatgctctgacagatatggaaattcttgtagtgtttatgaaggtttttagacagctgacatatcaagagatcggcaggcatttgggcatggactataaaaaggccggctctgtttttaactatgcgaagaaaaaaatgaggaaaggatggaaaatacggaatgaattttaaagaactgttaatgaaggctaagcagggagacaaggggacaagagaggaactgtttttgatgtaccgtcccatggtgttaagcaggtccagaatcaaaggaatcttttcagaggacttatatcaagaactttctaagacctttgtatcctgtattgaacagttttctattgaggggactgaaaacgagcaaaaataagactgaatttccttcttaatccgcagttaacgacaggaggaccagcaactatgagtctttaaggagacagagagtaagggaatacagcatgcagaggcaggggtattcccttttcctttaatagcaattatctttatgtatgctgctacatttatttcaagggtatctgatacttgtcccataagcagcttaatagcaatagggggagtcaggaccataaagactagacaaacactaagaagaattatctttgtgcctctaaaacccagctttacacgctcattttacgtgcaacacaaacaggacgcctgtctgaatcggcagacaacttaatgagtcagcgctttggggaataggaaagccgcccaaaggcggctcctagctttcagcattttacaaaataatagaactctatgtcatctatcgtaatccacacatatggattgcccaatatgtcccttacaccgtttacaacctgtgtgaacgcttcatggaatttttcataactttccacttcgactggattccatataattataaagttagcggtcaacccatctagatctggtccccgtttatccccacaaaggaaataggattcgcttaaccatgcgtttacatatatgcctgtactcgcgtatacttttttggcagcttttccccaaatcttaaccagaatgttctgagtgacgatttccggcataagtcccgcaatgacaacggtatatcgttttgtacgcatatgaatacccttttttattaatatattcagcgtacaaagaaaaagttattggctgtggtttcgcagccagtttatggcatttgatgcgtaaagtgcactgcctagggaaagaatctcctcattaaagacaacgtggtcattatgcatcggtttgccgaatagcggattttcatctggggttccggcgcctattaacatatagcagcatggcctctcataagtataagaggcgaaatcctctgaccccatgccgccttgttcaaacaatactattttatgaggctcatagcattctttcatgtagctggtaagctccttgaccatatcactgtcattttgcagcggtggtgcagaagcgatttctttcacacaagcctgtccgcgaaagagagaagctgtctgaatggagatttcttcaattctgtcaaagatatatttggatatcttgtaatccattgtacgaatgcttccctcgagaatcacatcttcggggatgatatttggcgcttcgccggcagtaaacctgccaatggtaagggcggcaggttgggtgggagcaatttctcttgcaatgatttcctggagagacagataaacatgggccgcaatattgatggggtcaacacctgcttccggcattgcaccatggcagccggtaccttttatatgaatttgaaataaaatacacccagccatgcaggtacctgaaccacacatgatcgttccggatggaatgcctgaaacaacatggaaagcaatgcctgcatctacatggggattttccaaaacaccggccttaagcattgcctttgctccggtgaatccctcttcgtcaggttgaaataccagttttacggttccaaccagatcctgctggtaatgttttaataatttagctgcacccagaagcatggttgtgtgcatatcgtgtccacatgcatgcatatagccattttcagaggcaaatggaacgggagcagcttctttaatcggaagagcatccatatcagcgcgaagaaggattgttttgccgggctgcttaccagatatagtggcaataacagcactttcgcatattttctgaggacaatatccatactcttccaatttactaaaaacaaatgattgggttcgtggtaagatgcaacctatttcaggatattgatgtaatgttcttctgattgatattagttctggctttagctgttttgcagactcaaaaattgatttcatattaatatcctccgggttaatattgactgaaatttaagaatatgaaaatggtttgtttcacatgtttctgttaatgaagtatatcataaaaagtgaaaagaatgtaaagtcatatgataaataaaacaatgaattaagaaaagcaaactagccatagggatacccttcatcaatcaataaatacacacagacaggccgccgctaaattgtagggtttatcatcaaaaaaacgcataactacgccgtttctggcgtaaaagatttcaaaaggtgttgcgttcgggcagcaccttttgttttgtaaattcaaggacaaaggaggcgagaacatggccgagccgggtgcattggattacttctatggaaccgaggcagagcaatacaccttttatcggattcccaaggttttgtttactgaccccggcttccggcgaatgacagcagacgcaaaaatcctgtacggcctgatgttagaccgtatggggctgtccatacgcaacggctggttggacgaacaaaaccgggtattcatctactttaccctggaggaagcgatggacgcgatgtgctgcggccacaacaaggcggtggcactctttaccgaactggataaggtgggcctgattgagcgcaggaagcagggccagggccgacccactaaaatctatgtcaagaacttcactcggaaagaggaagtcaagacttccgaaaatcggacacaatcaatactgataagaataagactgatttgagtgatactgatccatctatctatccggaggcaaggcccccggaagatagaccgcctacggcggctgatacgatggatacgatgcgggcctatcgggagattttgaaagagaatatcgagtatgatcacctttgccagaaacttggctatgacagggacatactggatgaaattctggaaatcctggtggacacggtatgcagcactcgaaaaatgatacgcattgggggcgaggacttcccaaaggaggttgtaagaagccggttacttaagctggactcggaacatatcgagtatgtgataagcagcttgcgggagaacacgacaaaggttcggaatatccgcgcatacctcctgacctcgctttacaatgcgcctaccaccataagcagttactttactgccctggtcaatcacgacctatacggcagcgggtaactgttttttcatactcaaataagggcggcgagccggtcttatccggcccgccttgattaccaaactgcaaatgaacggcactgtgtcaagaacgcgcacggtgcgcgttcattttattcttaacacggggacgggcatttgccacccggcatactgccgaagaaaggagcaaccccgtgaaaaaaccttttgcatacatttctgccgcctggagcggccaggaatttaccgacaccgaccaggcagcggtttactgccgtaaggtttatctggccggttttaccccgatttgcccaatcctgtatctgccgcattttctgaatgatacagtccacgccgaacacaaggacgggattgatatggcgcgggaactgctgcgtcgcagccatgtcctgattgtctgcggcgaggaagtggacgaagccgtaaaaaatgatattgccgcagcgcagcgcctcggcattacggccaccacattggacggtattctgaaaatcaggagccagggccatgaggagggctgttgataatctccactggctgatgcgcttcctgttgcatcggctggtggtgccaccttagtcgttccctttttccacttccaccctgccggaaaggaggaatggcccaatgcaggaagaaatggaacgaaaggccgtggcaatcagcgtcaaagcgggaaagctgaccgctgatctgctgaaaaaggccataaccaaagccctggctgaaatggagaaaagccagaaaaacccgaaaatctatcggggcaaacagagtgtgaatcaccttgtccggcagggcgcgggtgtttccaatatcgaagtgaccgacggaaatatcaagtcctttgaacgtgtggcccggaaatatggcgtggattttgcgctgaaaaaggacacaacaagccagccgccccgctatctggtgttcttcaagtcaaaggacgcggacgcgctgactactgcctttgcggaatactccggcaaggtagtcaagcgtcaggcccaggctaagccctccattcgccgccagcttgtgcagcttcaggaggtcgttaagaagatggcgcaatccctgtccaggaataagcaacaggaggtggcgcgatgataaaactccccaaaatcaatgcggccaaagccgcgaaagccagtttgccctatgtggttatgggggtgcttgcgaccaagctgggggaagcctaccggctgacctctggcggggatgtgctggacaaggttcacgggtatattcccgcttttctcttgcacgccggagcgaggtgccaaaggaataaacggtctgttgctttttcttagccacgctccgtcacctcacatatagtattgtactgtgaatgtgaggtattcaaaatgatttatgcgtagctttttagcggctactctgcgtagctactaaaaagctgtccatgtgtcttgtattattcgagaaaacgaactataatgagcttggaggtgcagatatggactatatgacgctgaaagaagcaagtaaaatatggggcgtaacgccccgctggataaattattattgttcctctggccgtattctcggagccataaaaatgggaacaatttggttaatcccgaaaaacgcggaaaagccgatagacggtaggacaaaacaagggaggaagctaaaaaatgcagaggatactttatgttgaagatgatttaagtctgattgatggcttacaatatactttggaaaccagcggatataccgtggataatgcccggactataaaaaaggcattagaactattcaaacaaaatgcttacgatttgttacttctggatgttacactaccagatggaaccggcttcgatatttgtaaagaggtgcgtagcaattcgactatcccgattatatttttaactgcgtccgatcaggaaatcagcattgttaagggccttgacatgggcggggatgattacatcacaaagcccttcaaactcaatgagctgctttccagaattaaagcacttcttcggcgctctctacaattttctaaagcagaggcaatcttggaggcgaatggtattcgtatagataccgccgaaaggcttgtttggaaaaatggcgagccgattgacctgcctctggtagaatacaaacttttgtgcctgttcatgcaaaatcctaatcatctcatgccacgggaaatgattttagaccggatgtgggatggcaacgggaattttgtagatgataatactttatccgtttatatccggcggctacgaaacaaaattgaagatacaccaaatgcgccccaatatctaatgaccgaacggggaattggatataagtgggttgttgagtgagggcggatttatgggcaaattagggaaagaaacaaagacactgttaatcgctgttactgctatctgcctcgtttcctttcttctggctggcggaattgccacacttctggcaaaaaattttcagcaggaattattgctccatgattatggtgttgcaggccatttgttaaacaatgaaaacgagctgtcaatctccgcttttacttcgcagccagacgcgaatgacatagaacgcggcagggaggctttggcttctattggatatgatgaaacgacttccatgcgttttctgcctgctgtccagatataccgaaatcagacaatgttttctgtatttctgctgttgattttcccgtttggggcaatctacttatcgctgtttctctatcttcgccgccagcacaaggctttcagtaacgccgaaaataccatccgccaatttctggatggcaataccacatcccgcatcgaatgttcacaggctggtgactggtacagcctttttcatgccatcaatgaaatggcgactatcctctctgctcatgccgagaaccagcggcagaccaaagaatttttgcaggacattatttcggatgtatcacatcagattaaaacaccgctgtctgccctgaaaatgtaccatgagattatagagagccataaagatgatgccgcaaccgtgagcagtttcaccgaaaaatctcaaagagagatcaagcggatggaagatgtgatttacaccttactgaaactggcacggctggacgcaggaattatccagatggaaaagaccccggaaaatctttccgttctcatgcaggatgttttggaacgctttgaaacttgggcggaacgggagcataaaacagttacgctttccggtaaagaagatgttgttttatcatgcgatgccctatgggtatcggaagccattggcaatattataaaaaacgccttggagcatacagagaacggcggccatatcggagtaaaatggagccagtcccctttaatgacacagattgaaattaccgatgatggaaaaggaatacacccggaagatctgtataacattttcaaacggttttaccgcagtcgtttttcatcggatgttcatggcattggtttggggttgccgctgactaaatctattgtagaagctcacggcggaaccatttctgtaaccagtagtttgggcgcaggaaccacgtttacattgaattttttcaaccttacagatgagtaagatagatgtcacttggaagtaagtcatagggggtatgatgtgcctgtaaggaggttttgaatatgaatattcttgaagtacaagacctgtgcaaaacctatggcacaggcgaaacagaagttcacgctttgaaccatgtatcattttctgtccgtaaaggtgagtttattgctatcattggcgagtcgggttccggcaaaagtactctgctgaatgtgatcggcgctctggacagcgtcacttccggcagggtgtggattgatgggcaggatattttttccatgccggagaagaaattaactgtgttccggcggcagcacatcggatttatttttcagtcattcaatctgatcccggagctgaatgtggagcagaacattacatttccgttactgcttgactataaaaagccaaatcaaaagttcgtcaatgaattgttgcaggtgcttggattgagcgaacgccggaaacaccttcccagccagctttccggcggccagcagcagcgtgtggcgattggccgggcattggttacacgccctgccctgattatggcagatgaaccgaccggaaatctggacagtaaaaacagtcaggaagttttggctttactgcaaaccatgtcagacaggtatcaacagaccattttgatgattacccacaacaaaaatcacgccagcgcagcagatcgtgtgttccgtatgaccgatggcgtgctgaaggatttgggggtgtcatcgcgttgaaaagctatcttggattggtgccgcaatatgaaaaggtacaccgcaagaacaatcgaatttcggttctctgtattgtcctttcggtgttgctgataactgctattttcagcatggcagacatggcgctgcgcgcacagaaaaattattttatcaagacgaatggggaataccatattagtttgaccgacattgatgaacagacggcggaacttgtaaaagcgcggatagatgttgccctctgcggatgggcctatcagggaagtaccggctctatcggatctaaaacggtcagcttcgcaggtgcgaatgaggataccttttccactttgacagaaatggatatggaaagcggttcataccctacccggcccgatgaagcattattgaaccaatcggctttggaacagttgggccttgcagttggcgacaccgtgaccgttatagtgccggatggctccagccgggactaccgcattaccggcgtccttgccgatatgggaagtttgctgaaagcggatgtatatggcatggtattgaccgaggacggttttcgccaaattgcagacgaaaatgccaaagatggaactacttttcgcgttcagtttaaagatggcgtaaacattcaggcagccataaaggaaataaaaacgcaatatggcctttcagacagtcaggtgagcgaaaacacggcgctcctcggattgatggggcaaagtgagaacagtacaatgcagtccctatacatcgttgcaggctttcttgtccttttggtactgatcgccggtgcagtaatgattgctgccagctttaacacaaatgttctggaacgggttcaattctacggctttttgcggtgtctgggggcatccaaagcacaggtaaagcacttcgtcattcttcaagggctgcgccaaagtatgaaaggcgtaccgattgggctggttgccggacagattattacatggtgtgcctgtctcttgctgaaatccatcagcggggaacgcttttcagaaattccgctttttcagttcagtgtaagcggtctgattgctggtgcggtgattggttttctgattgtactgctggcatccctgtctccggcaaaaaaggcttctaaagtatcgccggtaactgcaatcagcggcagtacgcagcttacacagaacaagagggccgcaaatacaaagttgttccacattgaaaccagcatgggaattttccatgcactatccggcaaaaagaatgtattcctcatgacttgttcatttgctatcagcattatgatgttcctgtcgtttcaggtcatggtagtttttctcaaccagggtatgcctgcgctctctccatcggcagcggacgtatctattacaatgggaaatacgcctctggataagtcgctggtgaaacagattagcgaaacggaaggtgttgacaaagtttttggccgtatggaaatggcgggtctttctgtttcctctgatatgggagaaggaaccgtcacactcatttcctatgatgataaccaattcgggtgggcaaaagaagaattgaatgagggcagtatcgcgcctgctatggaaaatacagatcgtgttctggttacttatcaggatggcgtaaactggaatgttggagataccatagtccttcatacatcttccggcgataagcaggtaacgattgctggaatactgtcaacagctacggccagcacagtcaacagcgcaggcagcagcggatatatgatttgctcggagcagacatttgccgctttggttggcgatttgggctatacaacgattgatgttcagttttcctctgctggtggggatgatactgtttccacaatacggagcatgatcccatccgacagcactgtttcagacaagagaattaccaattccgagtcccaaagctcttactatacaggcgcggtatttatttatggcttcctcatcattattgcacttatcacagtgtttaacatttttaacagcatgaacgccagtgtagcgtccagaacaaagcagtacggcattatgcgttctatcggaatgggggcaaatcagctttataagatgattgcggcggaagcctttacctatgccatctttggctgtgttgttggctgtgttttggggctaccgctcaacaagttgatgttccggtttttgattgcagataagtggggaactgcatggcaaatccctgtgggttcacttcttttgatcgtgttcctctgccttgcgtctgcggcggttgcaatcagacgccctatccggcagatcagcagaatggcaatcgtggacacaattaagctccagcaataatttcatcaaatagtaaacgtcaaaggctggccttccgtttccttggagggccagcctttgaacgcgtagaactgccgaaagaagcctatcatggggaaactggcgaagccattgaactgccgaaacgtgagaaaagaaaaaagtcggcgtgaaataccgccgacttacattccactctttgggtgtcactatcactactatactaagaaatgtttctggaatagtaagtataaatagcacgagttgtatgcgagttggagccgtattcagcagaacatatgaataaagggagtaactgggaatgataacaaggaggaaggggggatagaatgctgcatataaatgcggatgattacaagaaaagtaaatattgtccgtctgatgttggagggataggaggatttatatcaggaactgtccaagacctttctaaactgcattgataagtttctgattgatatcaccgaaaaagaaccaaaaagagactgatttgcgtcctgacatgaattgacttgcgattttcaatcttttataatggtatcatcggatttgaaaatctggatagagaaagcagctggttcgccggctgctttttctgactcaaaaaaacaagaaaggtggtatatgcatgagggaagacagtgaaggtcgtctggcagaggaggtgcaggagagggaaaagcgtggacatgtccatcaaatgggaatccttaccgtagatgcttccggagcagcggcaaggcaggagagcggggatataacctggcatgaaatggtgaatgcctaccgcacaaagaaaatcctgtctggaggattaagtggtatcgagcgcctggatggcggatgggtagtagcagtcgtctactataaagattaccgtgtattaatccccatggaagaaatgatgattaacttggagggagacggaagagaaaattccaatacgttaaaccgtcagacccgtcttgctaacaacatgctgggcgcagaactggattttataatccgggagatggaggaaaagtcaaggagcgtggttgcgtccagaaaagaggcgatgcttcgtaaacgccagcagttttacctgggacaacaggagggaccccctatgattgtgcctggccgtgttgtggaagcgcgagttattgccgtggcacagaaagcggtccggttagaggtctttggcgtggaatgctccttaaaagcgagggatatgtcctgggaatggatggcagatgccaatgagaaattctccatcggggatgttgtcagtgtgatgatgaagaagatatccggagattcgattgagaatctgaaggtagaggtaagtgccaaagaggcaaagaccaatgtcaacaaggaaaatttaatgcgcctgcgccgccagggaaaatatgtaggaaaaataacagatgtatttaagggcacctattttatccaactggactgcagggtcaatgcggtggcacattcctgtaatacagccagccttccggggcagggagatgaggtcggctttctggtaaccagaattaacgatgagcgggaagtggcagaggggattatcacaagaattattaaaagaaaataggaattttgtacctgagacagtaccagatgctgtcttttttatttgcacaaatatgaaaggagttttgatatgctgaaaggaatcgtgaaatggtttgatgtacggaagggatttggatttattacagatgaggacaacattgattattttgtccattattccgaaatccagggagatggttttaaacggctgaaggaggggcagaaagtgaactttgagccaggggaggatgacaggaaacgaagtgttgcattatcagtgacggtggaggagcaggaatgaattggcgaatcaggatgaaaaagcggcatgccttgtttgttttggttgccacttgttctgctatcagctatctatttggctttatagcccatgcggagacagtcagaggtgaggaggggaggtttgagacaggagatacactggaggttgagactggcctcggtgatggatacagcacattgggattcacctgtctggatacggattaccggggtggatatctgtttgtgtcggatgagatcattccctactccctgtgtgtccgttatgcggcttccaataacgattatacctactcggatgtcaggacatggcttaaccagcagtttgctgataccttgtcagtatcaggggacctgctccccgtaaaactttcagagactggggattccatatcagaccgggttttctgcctgtctgttgatgaagtaaagaaccctgcctacaaagcgattaccagaaaaatctggacaccgcaaagaggaatgcgctactactggaccaggtcgcctagagagaacacgacaaaccaggcctatatggtgcaatacaacggacacattgcttccagccgggtatcattaacagaagccggggtccgcccggcctttgtcatacagaagggagaaccaaataatacacagggcagaatctggtataccggggatacgatggaacggtcaattgccgggaaatcatataccttccgctgtattgatccagattactgtgatgccggaagtaaccggaatggagcgctgtttctctgtgacaccattattggtggaagcgaaagcctttttgacgggagggcaaatgcctgggaagcgtctgatttaagggcatggctaaaccaggaattggaggatagggaaaagcttgcggaaacggttacaacctgcccgtttacctatgcgggaaaaagtaataattaccagatttcagcccggagctttacaaagcgcagccgcccgggacttaaagtcacggaccagattttctgcctttcattggaagaagcactccggtattcggatattttatggaggcttggtggtgcagaagagaataattttataaatgcaggaaccttcacgacgggctattggctgcgtacacctgcggccggagacggaacgaagggttatgctgttacctatgacggccgggtggcaccggaggatgtaaccaataagaaaatcggtatccgtccggcgtttgtggtagttcaggaataaaaatttgcacatagggaattttctgagaaaaaggagaacaagatgaagaaaaagatgaagagggggcaggcagttctatctgcatggaccttgattgcagcgatggggttaactccagttctttctgtatcatatccaaacggtatcgctaccgtttatgcaaaggaggccgttaacgaggcggtagaagaagccggtacagctccaatggccagtccgtcagaagctaggcgggagaaagaaaaagacagcgcagaaggggaaatggcgcaagcaggtatcacccagactgaccagaaggcggaccaggatacaggaacttcagatttagaggacaaaacagaagcaaaagcggagaaagaggaaaccgaggcaggaacggaggaaatcaaaaccaaggaatcagaggcaggggcagcagaagtcataatcgataaagatgagctgattccggccactccttccaatgctactccttccaatgccatgttttacaaaggtgccttgaatatttggggcggtatggaaatgagtgaccattttgatggagagggaaccgaggaagaaccttacgagattaactcggataaggatttaaaactcctggcgtatcatgttgccaatgaggaagtggacggttatgaggggtactattttgctttgacacgggacatatccttaagcgatactgcctcctggctgccgattggatattttacagaagccggggacagcgaaccgaaaccatttaaggggaattttaacggacagggataccgcgtgtataacctgaaaatcagtgatacgactcaggattatgccgggctgttcggcagtgtccatggagcggtgattgaaaatctgacggtggacggacaggtgaatgctcacagtaaggcggcacttctggttggagagacgaacgacagcaccataagtaattgcagctccagaggacaggtgcgtggcgtaggtgtcatcggtgggattgttggggaagcatatgacagcgtgattttggagtgtaccaatacagctggagtcttggggggaaccgatgcagacggcgtaaatgatgcttacgctggaggaatctgcggctctgcccaatcctcctttatgagtgactgcaccagtgataccacagatagctacagcgctctttactcagaaggatatgtaggcggaattgcaggaaatatctacgaaacggaaatatataatacatatgtggaaggtaaggttggcagcacgtcagcggattatatcggtggtctggtgggaaggatgcagagcggccaggttaagaatggccggtttgcagggaccattggagcatctacttcatcgacattaaagacagcgggactctttgtgggatatattgaaggtgggaccattgatttaggagatgacctcgcctatctctatacggatagtgaggacaagtactcattaaatccctttggaaataaattaacaccgcaaattcggctggaacatcacatcggagcatattattccaaccagcgggatttttccctttaccagatgggaagttttataaagcagacaaaccgttatttttatgaggaactggaaacgggagttttggaaattggaaaagagaatatccatcactatgctcccagtaagacgggagatccggtcagggggtatttgattacaattccggctgtggaccatggtacactctctgtgctggaatcccagaataattttgcaaaagaaatcaactgggcaaacccgggagccgtagcgaagggagccaaagtcctggtgtatacaagtcctttaaatgaaacagagtcagagccccctgtatattatgaattggtgccggattccctgtcctggacaaccgacgattttgacaaagaggaaatcatacataccaatggggctgaaacctcctttaccatgccggaaggaaacattaccctgtctgctaaataccgggcaatgactaatggtgttatcctggataagacggagctgacgtttgagatagaacagatacgcagcggttcccgttggaatccgcagataggctggaaggttactgatccgcagaaactgacggctaccgtaataccggatacggcggcaaacaagaacatcatttggaatgtgaaagatacggatggctcatctaccgatgtcatccatgttacagaaaatggggaggtatcggtcaaccagtcggcaaagtggattcaggagctgatacaagccggtgtgaccaatcaggaattatatccgtccaaaaagataacaacagagggaaccaactatgcgtctgttacggtaaccacagaagccgggcagaagcgttccagtgcatttgttacggtgaatttcaagattactgacgatacggttgtcccggtatcagatgttaagctcgaccagtctgaactggcatttgagattgttagaacattagaaggggaccgtttggatcctacagaacgttattccgtcacaccttcaaagcgtctttatgaaacgattactccggaatatgcggacaacaaaaatgtgaaatggtctgtaggtgatgtggatatgctccggattgattcagagggtattgtgagtgccaaagagaatgcaaagtggattttagatttaatcagggcagaagaagagagaaataaagagcacccttacacaaaaaaggaagcgtctggtacccgttccaattatgtgacggttacaacggaagatggaggaaaacagtcggtatgtgcagtgaatctttccttccgtaccgatgaccagaccatagcacatgtagcatcggtagccttagataaaagcgaacttaagttcagcatagagaaggtgatgaccggcagccgggccaacccgtctgtttcctatcaggtgacggatgcccagcagcttactgctttcgtgatgccagaagaggcggagaataaggaggtaagctggaactcggtgaatgaagcagtggtatccgtatcaggtaatggtctggtgacagttttgccggaggcagcatggataaaagcccttgagaaggtcgatgcagataatcttgcaagagacaagtattatgtatccacggcggcgggaacaatggaaaccagtattcaggtgcttaccttggatgggcagaagtccgcagagtgcaaagtcattgtagcgtttaaaacaacagatcagacacagcggccatcaagcggttcatcgggtggaagttcctccggtggtggtggaggcggttccagccgctctgtcataggaagtgctatgagtccaaactctgacagtgctggaacctggattcaggatagtaccggctggtggtatcagaataaagatggaagctatccggctgcctgctggcagctgcttacctataatgggacaagtgagtggtaccattttgatgagaaaggatatatgcagaccggatggtttacagatacggacgggaaccgctattacctccatgccgtttcagacgggaccagaggacgtatgtataccggctggaacctgattgacggagtgtggtactattttaaccccacatcagacggaaccaagggctctttatttatgaaccgccagacgccagacggataccgggtagatgcgtccggggcttgggtagagtagttggtaaaattgtatatggaaggaaaggtgtggagagagtatcttcatgccttttcttttgtagccattttatgaagttattgggcgctggaagggatgcctttgaggtaattccttaaaaaaaagttcagaaatgccctcgacatagattccagagactttgtatgctatggatagaaggaggtgcttataatgagaaaaagtacaggctggaagctggcattcatattcctggcagttaccctaaacccgatgtcggcgtatgcaggagcatggaataatacttcaaccggctgtcaataccagaaagatgatggaaattatgcgagggcggaatggataacagagaatggaacatcgtattatctgaatcagaatggaattatggctgtaaatactactacaccagacggatacctggtggcagcagacggcagttgggtgcccgaacagcagtcgcttggcggctatgtccgaaccccgtatgataaccggccttattattacgatccagaatggcaggtatatatctttgatgaagatacggactatgcgtgggtgaatgacacacgggtattggctgcggtcaggggaattatccctgcatcggagctgtcagaaaagaaccaggtagtttatgaggaggtgtgcaggtttctgactggttttgactatggcgccagtgattatgaaaaggcgaccaggatttatgatgagattacattacgtgcgacctacaaccggggaaaatatacacaggcagatgatgaggtctacagcattctggtgaatgggactggcaagtgtgttgggtttgccagggcctataaacttttggctaatgcagtagggcttaagtgcgcgcttcgggaggattacgtgcacatgtggaatgccgtatatatagatggtcaggcaaaaagcattgatgtatcttcaacgagaacggatgcgtgtttttatctggatgtagtggaactcaaatgtccgttctgcgattacagaaatgtattcggattaagggaggtttgccacccttgtccaaactgcaaagcgcagctgtataatcctgatatgaattaaatagcctaagtcaaaccggcacagcaatgttagtctgtgccggttttttggaaatgaggaaaaatatgatacgacacgatagctttttcaaaagactgaagcgtggtggctcgctgtttttagcggtgttacttgcggttcagtctttttttaatgttggatttggtattatttcagcagatgcatcggagggagaaaacagaggaagtacgtttgcctattatggctcccagaatcttttaaaagagggagcaagttttcccttttatggaaaaaaacataatcgggttggcctttggccatatgggattaccaatgtagaaggcggccattcagcacctggatactgcctggaaccgaataagtccatgcgttcgggcactccgggaacgattgtaacatatgaccttgatacggatggtgacaacctgccccttgggctgacaagagaggatgcagaaattttatggtacgccctctcatcatcaggtaattttgaaggaggcatttcgggaaatgggaaaatcggccagggacattatattttggggcaggcagctacctgggccattatgtcaggaaattggaatgggttagatgatttccgtagtcagatggaagtcctaatcgagaacctgaaagatcctatgcttgcgatattgacaagaggagcattggaacaattttttaaacaggttaatggagccgtggaggaaggagccgttccaccctttgcatctaaatttcaaagccaggcgccggtacataaaatgaaggaaaacggggatgggacctatagtattacattggagtttgacggtgatgattggaggcagtccacgcttgtttatgatttgccagaagggtggaatgtgtctctggaacatggcagaatcacatttacatgtacgacaggtaatcccgatattggccttgtgaggggacattttcaggatggctccctgggggctcaatactgggttaagccaaatagctttaaaatctggtatccggatggttggaacgagagcagtgcagtagatgggaaacaggccatgattacaatggcagggaaacaggaatcgtgggaggtttggctgtcttttggaaaaagtacaacacaccgcggggaaggagactatgaaattccatatacccagtaccttcatgaggagacctttaagcgggattatgtcattgaactggaaaagcagtgttccgagacagggaaaactttggaaaactccacctttgaagtattagaaaagtttgagttttcgcagcttgacgggacaaatctggaaaaagaccagtttatgaaaatggtgcccacatcagaagggaaatttgaagatttaactgtgtgcgatatggggcttggtacagataccaacggacatttttcgcattcggataaaaagctttataaatatgagaagacttattgtgggggacacccagatccagtcattcattatgtggatggagactctgactcggccgatgaagaaaatgaacgccggaagaagaaagcctgggatgcctggcaggagtgcgtggactggtgtgaggaaaattgtgatttccattccatcgatgagggcgttgccagagacttaatggaggaggaccgggatgaggcatggaatacctatattcacctgaagcgtatttacacagtcagggaaacagacgccagaaccggatatatccttcatgacctgcacaatgatgatgtctccattgaaattgttgaattttcatcttctcagtcagaaggagagggtgccattaccagctattaccctggcaatcgggcagtttcggttcgagagatgaaggatgtgccgcagttgtcaaaatcggagaaggttacagatattgttcaggcgggaatgtcagatgaagggaatcaaaccagtgattcagttaccggacaggaaaatatacctgaggataaagggaatgaacaagagcctgcttttaaggagcatgagaacacaaagaaacatgaatcggaatcttccggtgacacagcagagaacggcgaggaaggggcgaaggaggtggaggccgggtcagaggaaacagcagatacaacagaaataaaagagtctgatgaggcatcccagccatcaatggaaaacagagaggaaacagatgaagaggccagtcctgaagctgaaacgcaggattctggaaatgaagctgaatcagtggaagaagagaccataacagatgaccttcctaccgtagcaaccagatcccagatagggatagaaaaggacgtggcaacaccgtcaaatgcgtccacctatttggtttcacgcccggcctctataaaagttggaacaggcgggcactgggaatgggatggtgtccaggaagacagtgaagtggcaccgattgagcaaggcagctatccgtccgggtacattggttacgcttatctggtgaaggatcacaggacagaaggagagctgcatattaataagcgggataaagaactttttgagctggaagaggacagctatggaaaagcccaagcagatgcaaccttagagggcgctgtatatggactatatgcggcagaggacatcaggcatccagatgggaaaaccggtgttgtattttctgcgggggagttggtatccattgccacaacggataaaaatggtgatgcttcattcttaaccataacagaagtatcagaaacctcaagagaggtaccgaatctctatacgaataatgaagtgcggaatggaaatggctggattggacgtccgcttattttaggcagttattatatagaagaaatctcacgctctgaaggttatgaacgttctgtaaccggcaagaacttatctgagagcaatcgaacaggaaagcctattgtcttaaccgcgtcagggagcgcctatacagatggatttacccatagtattaatgaatggtttgaggattcctatgattttacggttaaatattataaaacaaagggtttcgatattctgctttccggtctcccggagcgtgtcaaggcatatgaggtgacaagaaaagagactgcatcacaggagcaggtgataaccggaacagagtgcgtagagaaaaaagatgcgcagggaaatatcctgtaccggactgccgagggtggagaatacaagttagacgaaaccgggaataagattataaaatcagatgatagcggcaatccggtgttgtctgaccgggcgctcacccaaacggtttcggcagtgaaccgattaaatgattatatctcatccattgagcgggaggaaccgtccgatttggatatggaagaatcagaagatattgatgaggattatattttgtgggagacgtcatcggctcttgctctttcggggtataagagtgggctgtctgattacccgtttaaaaaactcaaattatctggaaagacaaatgggaagataatagatgagattctgaccttctgctcctcggaaagtttttgggatgcatatgatgtagatgcagtatatgaggaggcgggaacctggtatgcaagaattcgttatggatataaagcattggcgaaccagccagccatttatgaaagcggcagtggtcttttagtaatccgaaaggaatatgagggcgggttttattatgcagtctatgaagagggacagtatgatatggatggttaccgcttcacagtagagaaaaaggaactggacctggaggctttggggcaagacgaaattctgttaaagacggtttatgcacctgtctatgagacctatgcgactggggagttcatattggacagtgaaggacagaaaatcccgcagatggaggcggttccaatctataccagccaggaggtggtttcctatgaggaaattctgatccctgtaaagacaaccgcagtggagggccaggtgagcatccatgtggatacggacgaggaatttacagagggggaaaaacatgagagaacttaccgggtagtgacagaacagaaaataacagaatatacagcaaccgtgaatgtcatgacgaccaaacctgcacagaagagtggctcttatctaaagttccctgtattattctatccgggccagtatgaaatctatgaagataacggcacacggaaagagccggttattatgctggagcgggtgattaagcaggcaatcgaggtgaaaaaggatattgctctggactcctatgagcataatacctatgagattcaccgtgacccgtttaccgttctttttggagggtataacggaacacaggagacgaagacgcttcccggctttttctttaaactgtatctgcgttctgatttagagaaaacagacaagcttatgaaaaaggaagatggcagttatgactatgtaacatttttcaaggaaaatcccgatgctgcgtctgagcttgcaattgagtgggatttggaaaagtatgatgcagacggggatatgacaaccgtacatgcaaaccggggcggcgggaaggacgactactggggacaaagcaggatgcttccttacggtacatatgttttggtggagcagcagccaacaggcatcccacaaaaacattatgagattgatgcgcctcaggaggtagagattccttttgttccacagatagatgccgatggtacagtacatgataaaatcccatctaaggaatatctttacgactctgccatgacaccggaggaattgactgagcgttatcagattcgatttaatgaagaaacccatatcatatatgcgcataataatgacggcgattttgaagtgtttaagtatggtctggagccggacagcagaagggattgccagaatgagacagtagcgaggtattatcattacggatctatcagcgaggatgctggaagtgcagaccaggtgtattatgaaacttattacgaccgggatggaacgatagcggattatggtgtaacaatgaatggagtggttaccatgaccggaaagtctactgccgtggaccggatgtacgcgaaagcacttgtaccctggagtgtgttagatcccagatatggagaagtaatcaacgatgacggcgatatcggaaaccgggaagctggcctggagacagatggaacctttaattttatttcctttgcagtcaaggattttgagaatgagttttacagctccagactcaggattgagaaattggattctgaaactggagaaaatattctgcatgaaggagcactctttaagatttatgcagccaaaagggacgtgattggaaatggtgcttccggtgtgacaggaagcggggatatcctgtttgatgaggagggaacgcctctctatgaggaacgtgaacagattttcatgcaggacgacaccggagcggaagtaggggtttttaaggcttacaccacaatccgggacggagaagttgaaggagaggacggaagcctgcatacagagaagcagtgcgtggggtatctggaaacgtatcagccgttaggcgccggcgcttatgttctggtggaggtagaggcaccggatggatatgtgaagtcgaaacctattgcatttacggtatacagcgacaaggtggaatattatgaagacggcaatcaggagaaaaggacgcaggcggtaaaataccagtacatgcgtcccattggcgctgacgggaaaaccgttgtagaggatatgcaccagattattgtaaagaatgcacctacacatatagaaatacataagctggaaaaccgtgcggatgccgtcacataccgtgtagagggagatgaaaagcagctaaataaccgtggggacgtggatttacagtataaacccaatggggaatttgccgggtttggttatgtgacaaaacgccttgaaaacggtcaggagaagatatatgtggagaatgcaacactgacattgtatgaggggctggaagtaaagcagactggggaacacgagtatgagaaagtcaaggtgaagagaaatctatttggctcagtaacgggaatccaggcgtatgataccggcgtggataccgatataagacagactgggacaaacgcagcagggcaggcggagtgggatattacagaagaggataatccacccgtggacatatggtattttgacttaaaatatgatcccacagaacttgatgaacagaccggcatcctctatggactggatgactgggggaaccgtctctgtatgttggattcagaaacaggtatggcttatgtgacagataaaaccggcgcagtgattgtctggccgcttgatgaaaatggggataaaatcatttcccaatccgtagaagtatataccaacggggaaggaaattcatctatcaacatggatttgcagccagtaccagatgaaaacgggcttcctatctattataaggatggcggtgttatatggattgagaatgaatgggtgacggaccatggtgcctgtgaaattgcaagagtaaggcagggcgcctatatcctggaggagacagctgccccgttgtcagacggttatgtacagtccgcatcagtcggtgtgattgtccgtgatgtaagcgagaagcagtcctatgtgatggaggatgattacacaaagattgaggtatcaaagcttgatatgacttccagaaaagagattgagggcgcggttttaacactctacgaagcataccgcgtctatgatgattccgaccgggggtggcatttggaaattctccgggatatggaggataaaccgattgtagcggaacgatgggtgtcagaaggaaacgttccacactggattgaccatatcatgccgggagattatattcttcaggaaacaagagtaccaacaaaggccggctatgtgacggcggaggaggtggaagtcaccatattggaaaccggtgaagtacagggctatgtaatggaagatgatcatacagcggtagaggttttaaagctggactcccggaccggggctgtgatggataatcttcaccgggccacactggctttatacgaagcccaggtagatgagaatggggaagtgcagtatagagatgatggaaccatactctatcatcaggaaaagaaggtgtatgaatggcagacagatgatggaagtgatgtgagaaaaacggcccatcaggttaccataccgggtggacacagctacacggcctatgattatgagatagagcaggtttcgggaacaagtcaggcggtttgctatatcacggagacaggagccatgcgtttcgagtatcttccggtggggaaatatgtgttggtagaagagcaggctccttacggctatacagtggcagcaccggtttatgtaccagtccttgatgtgggttctaaggaacgggtgcagaccattaccatgacagacgaaccgattcaggtactcctgacaaaagtgaatgtggcaggtggaaaagaaatttccggagccacagttgccgtctaccgtgcaaaggaagatggtacacttgccaaacaccaaatgaaagacaaaaacgggaatctgttgtatgtaaccgatacggacggcaatctgttgcaggatgaagacgggaaccatattccggctatggagtacgaagaggcgtatctggtggaacgctggatttccggctcagacggaacatacacgaagcgggaccagaaagaaggcaggataccggaaggttatgaaatcggggatttaaggcttcatgagttaagtcagccagccgcagggaattactattttgttgaggaacagtctccctttggatatgtgagggctgcagaactgccgtttgcgattgttgatacactggatattcaaaagattgaactggtaaatgaactgattctgggccaggttgagattatcaagaccgataaaaggagtccggaacaagttttatcaggtgcaaggttccgattgtccaatctggataccaatgtggcgaccattctgataacggattccgatggtcgggcagtcagctccccggtccccgttggagggataggaacggatggggcggtaagcctctatcatttccggatacaggaggtggaagcgcctgacggttatctgcttgacccgacagtccacgacttccagtttaatataaagacagaccagtaccagacgctcacctatcagtatgaagcagcggatagccctaatagggttatcatttctaaaaagcagcttacaacaaaggaggaactgccgggcgccagcttagaggtccgcagagtcacagagatggttgacaaggacggaacggttatacggattgacggtgatgtgattgaaagctggatttccacggaggtcccgcacaaactggaatgcctgacagagggaatgtatgtcctaatcgagacacgggcaccggaagggtatatagaagcagagaaagtgtactttacaatatccgggaacatgacagtggatgacatccctatggtggagatgtttgatgatgacaccaagattgaaatcagaaaggtggacagtgaaaccggaaatcctttaaagggcgcgaagatgcagctgattttgcaagcgtccggggaaatcattaaggaatggattacagatgaaaccggagcgattcagttcttcggtctcccggcaggcgtgtacttagtgaaagaggtagaggctccggaaggataccagataccggaaggtcccatgcggattaccgtgaccaaagattataagcaacagacgtttgtaatggagaaccggatgaccgaattgatgattgacaaactggacgaggagaccagggaaccggtaaccggagcagtgctgcagcttacagatggggaaggaaatcaggtggcgaaatgggttaccactggggaaccggaactaatccgcggcttaaaggcaggctggtatatactggaggaaatccaggcggcagacggctatctgcttttaaaggaaccagtgagaatcgagattctggagaaagcgggaatacaaaccgttaccattacaaaccggaaacttgaagtggaagtggcaaaaacagataaagagaccggagaaaacctggcgggagcaagacttcagttgattcgagatgccgatggcatggtattgaaagaatgggtaagtgggaagatacctgaaatttttaaaggactttctgtcggagactatacaatcagggaactgacggccccagagggctatgcagtaacagggcgtttaaacttttgcgtgagcggaaccgaggaaaagcaggagattaacctggtaaatgagaagattgtggtggaactccagaagacggacaccttggaaggcagcccagtggaaggagcggttcttcagcttctaaaggctgcggggacaaacgaggaaactgtaatgaaagaatgggtgtcaggaaaggagccgcttatcctaacaggaataccgtctggtatctatacaataagggaaacacaggcaccggaaggatatgtcccaatggaggatatgaaaatagagatccttcctaatcagaccatgcagcattttgatattaaaaaccagccaattcagatagagataggaaaggttagcggagaaacaggaaaactgctgggcggcgctgttcttcaactggtaagagattcggacggtacagtaatccggaaatggacatccagggacggtgaggctgaacactttaaaaaccttgcgggcggtacgtatataatacgtgaggtgaaggctccctccggctatgagaaaatggagccgcaggaaatagaaataaaagatattgaggcgatacaggaatttgtggtcaagaactataaaatcacccattcaggtggcggcggtggcagcactccgaatcacccgagaccctcagcggagtatatggaactgtttaagattgatggaagaactggccagaagcttgcaggggcaaagattaccgtttacaatccagacggcagtgtctatgcggaaggatttacaaatgcagcaggaatattccggtttaagaaacctttaaaaggagcctatacatttaaagagacggaggcaccagagggatactatctaaatgaggtactgcatgcgtttgcagtaactgaagatgggaccatagaaggggatacgactatggaaaactacagtaaaacagaaatgataatctctaaagtggatgtaacaacagcagaggaactgcctggcgccgagatcgaggtcacagaccaggacggaaaccatatcttctccggcattagtgatgaaaagggaaaagtatattttccggtcccgtctccggggaaatatcatttcagggaactgacagcaccggaagggtatgacagaaacgagacggtcttttcattcatggtgtttgaggacggcagtataattggcgacaataccattaccgatcagaaacattacggaacaatcacggccaattatgagacaaatagaaggggagagggtgatttgatggtcggtgaacttaatcatgcaccaaagacaggagataccagctattttgtaggggtgttcatggcatggcttgcatccgtagtcagcctgttaattgtttccctctcaaagtggagaaaaaaacaaaagaaatcaaaaacagggataaaggctggcatgtttctactgttggcaataatggtagttagtacgccggtgatggagtctcaggcagcggaagatgtaattgaaaatatatatgaggaacaccagtatacaacggaaaaccccgattctaatgaagcagaaaagctgtttgaaaaagaaattgagagagacggaaaaaaataccgtctctcagaaatccggacagaagtgctggaagaacaggggaaaaggagttctggaaattcttttgaaatcgcaacaagcccgtttattgatggaaaagtggaggttaggccgaaagaacagataacccggaatggaattacttatcatttggtaaaatcccagaaggaagcagccgttatacgggctcatgaggtaccggtaagtgaggaagtcttatatgaagcagtggaagccaaggacatgataccgtcaaaaatcaagatgacggtaacagatgagaaaaccgggcagatgatggagactattgcaaaaatttctgaccagacatttggcggggagcgcctggatgatacattttccttttcagctgtgttccatgaatatgggctggacggctattggattggggaccaggtttttaaactgagtgggactgaaccagacttcaccggatatgaagggcagctcctttctctgattgaggctgatgctgtgcattataccatagaagcagcaaggtgggatggggaagcttacacagatgaagcgggtatcctatgccgtagggttgttataactggtaccaagaaggtgagtgactgtacagtgatgtatgagggaagtgcctattttccggaggaggaaggcgtacgcctgatttctacctatgatagcggggaagaagggggagagcaatacaccatgaaagcaacgggggtttacatacctaaaaagaaccatggagcagcggtcgccactgtgattggtgttaccagtgtcggtgcaggtactgcaggatatacctattatcggaaaaagaagcagaatcaaaacgtataagcaaagaggggaggaatgggacatatttctccccataaaaaattaatgcccttgtattaaggattaaccgttttatacaatagaactatattaaggaggaaggagatagaagaaatgaaaaaaacacagaaagtagtccgaatacatccgcgtaagaaacctaaccttacaatgcccgtttgtccttactgtggacgagacgctgttatgcggccagccgagtatgtgtatggtgatgatacgataactgcaggaagcatgctgtatgtatgcagcggatatccggattgcaattcctatgtaggagttcatagaggaacgaaaaagcctatgggctctttggcggataaagaacttcgtaataaaagaatccgcgcgcatcgtgccatgaacagactgattgaaagtgggtacatgtgcaaaaatggagtttatgcctggttatcctgcagcttaaacctgccgcctaaagagacacacatcggatgtttttcagattatatgtgtgagcagaccatcatggagtgtgagcgagtattagaaaattggaaaggaaaaagagctgcataaaagggggcataagcacatgagattagagccatcagataaactaatgtatcacagaatggatcaaagggatagagcattgattatgataccagtttttggaatagcagcctcattggggctgttttttcttgcggcccgttttccggccatcatcggtggaccattcatcggacttggtgtgtgtggtatgtttggaagcgcaattcgctattggaagctaaagcagttgattatgccattaagcggatgttgcttagaaattcagaccagttgttttgttgcaaggcaaccttggaagagggaacactacgagcaatgcagaatctattttaaggaagttcaggcgctaataagggaagccaaagcaggtggtttttatctacagattccagaaggcggtgagagtgaaatccgtgggtttggagaaaaccggcggtgtcttttctatgtcagcccatttggttacccggaggataagatgcagaccatgtaccagaccataaaagaaaggctgcctgaaacggcagaaatatatgaatatgaaacatgaatggatgggagttccggaaatgttaataaaaaagctaatcataaatgcaggtgtcatactgggcatcctggcagcgggagtttttatggagattcatcaggagggagaaggtgttttaaaactcacaatactgtgcgtgaccggcctgggtctttactttctatacctttgtcaggttattttccagaagaaatatgagacgctggtgggagaagtgaccctgatacaaaactgtaagggcagaaaaagatattgggaaattgaggtggtagatggggaaggcaaggcaaagcgacttctggtaccggttcagagtggggtgaggaaagggattgtgtaccgatttttcttgaagaatgatattttgctgggggtggaggaaatgtgatgagttatagaaatatatggtaatctgagggtgaagtatgtcaaagatagccgtatcctgcttgactacttcagtagtaattgcagtaagcgtatgtaataaaatcattgtatgatacattgtttatatgccagatttttttataaaataattttagactatctcttgacaacaaagaaagcaagtgatatattctatatgacgatataaaatatttagtcataaggaggtgaggaaaattgccgcgctttacagaacaagaaaaagaaatcataaacaggaaacttttgatagagggggaaaagctgtttgcagcacacggcttgaaaaaagtaacggttgatgatttagtagctgctgtaaatatatcgaaaggttcattctacgctttttatccgagtaaagaacacttatatgtagaaatcaattttcgcttacagaaagagctatttactaatattgaaacagcaattaaaggaagaaagtatgaaaatcatagggacttaacaaaagatgttatcactttgggggtaactgggttgattaattctcctattctttcgcagatcgatttgtctttaatggactatctgcaaaggaaactttcgccagatatatttgacagtcatatgcacaatgatatacgtatactagaaatgcttgaagatttaggggttatttttacgattccgcatacggttatcataaaatccctgtattctgttttatcctgtttggaacagttcaaggaggataaagaactgaatatgatacaaaatcttttagtgaatggcattgttcaacaagtagtagcagagtaacaattttgtttggttatttgacaggcagatagccaaacatattttttacagtttgtatgactatatatttttatgagtcataaagtttgaggaggacaaaataatgattgatgtaaaaaaactgtattttagctatactgacaaaccgtttgtcgagaatgtaagtttccatgttgggaaaggagaaatttttggatttttgggcccttctggtgccggaaaatcaaccattcaaaaagttttgaccggacttaatacaaaatataaaggcagcgtaaaagttgcaggtacagaaatacgggagcgtacaaatcggttttatgaaaatatcggtgttgattttgaattttcaacctgttatgagaaattcactgcacgacaaaatctcgcctattttgcttctctgtatgaaaagcagccccggtctattgacgaactattgcatatggttggattggaaaatgacggagataaaaaggttggcgacttttccaaaggtatgcgttcccgcttgaattttatcaaagcgttgatacatgacccagacatattattccttgatgaaccgacaagcggtcttgaccctacgaataatcgtttgatgaaagatattatccttgcagaaaagaaacgtggaaaaacggttatcattactactcacaatatgtttgacgcaacagagctatgtgatcaggtagcctttatcgttgccggaaaagtaagcgcattggatagtccgcataatttgattatgtcaaggggggctgcaaaaatacaatatacctactatgataaaggtgagaaaacgggagaatgtctgcttgatagaaccacagaagataagttattgaaaaacttaatttccgaaaaccgtctgctttccattcatagcagtgagcctacattaaatgatatttttgtagatattacagggaggacacttcaatgagattgggacgtttaatttgtggtgatatacatttccaatggaaatatggtttctattttatctactttattttaaccgttttatatgtgtgtgggattgccgctttgccggaacattggaaaacggatattgcttctattatgatatactctgacccggcagcaatgggattgtttttcatgggagcgattgttcttttggaaaaaagtcaaaaggtattaaatgctatggtggtatctcctgtaaaaatatctgaatatatactttcaaaaacagttgcgttgattgctatttctacggtaattgcattgatattagggttagtttccggcagcaatcatttgcttggtatcgcagttggtactgctttgacatcagcaatctttactatgcttggaattattgcagctacaaagatttcaaacttgaaccagtttcttattgtaattatgccgatagaaattgtttgctttgttccacctattgctggtctgtttgtgactttaccagatgtgttttgcttttttccgttcatggcttgtatgaaccttataactggaaaaagtatgttactatcgttcgatatggtaattgtaattgctacgttgaatatcctctacataattgcaagggatacagttgagcatatgtggaaaagtttgggaggtgtaaagctatgaaaaggatactatccagtgccatacaagtatttaagcaaatcaaaagcgaccctatgatgtttgcggcttgcttcaccccttttattatgggagctttaatcaaatttggtattccattttttgaaagaataacaaagttttctttacaaggatactatccgatttttgatttattgctttctatcatggctcctgtactgctttgttttgcatttgccatgattacgttagaggaaattgatgataaagtatcgcggtacttttcaattacccctcttggtaaggcggggtatctctttacaaggttggtagtacccgcaattatttcagcggtcattgcttttatcgtacttttgcttttctcattagaaaagctacccactagaatgatgattggtttagcacttctcggttcggtacaggcaatcattgtttcacttatgattattaccttatccggtaataaattagagggtatggctgtaacaaaactttctgcacttacactgttaggcattccagttcctttctttatagatagttactaccagttcgcggttggcttcctcccatcattttgggtagcaaaagccgtacagaatgaagcagttctttattttcccatagcattggtagtagctttgatctggtactacttccttataaaacgtctgtttcggaagctggcaggataagggggcatatatgaataaaaataaaatcctgccaaacgaaaatgtaaatacggcaatccgggtttccacaattacactaatcatcaacctgattttatcgctgcttaaatttgccgcaggatatataggaaagtcaagtgccatgctgtcagacgctgtttactcggcctctgatgtattaagcacaatcattgtgatggctggaattaaaatatcagaaaaacgacctgatagagaacacccctatgggcatgaacgtatggaatgtgtggcttctattattctcgctgctgcattggctgtaacaggagccggaattggatattcaggtattaacaaaatctatttagggcagtacaatacactttccgtacccagtggaatcgcgctcacggcggcagtcttatccattgtaataaaagagtggatgtactggtttacgagaggtgctgcaaaacatacaaattctgacgcacttatggctgacgcatggcatcaccgctctgacgcactctcgtcagtcggttctttaattggcattttaggagcgcgtttgggctatgccattcttgaccctattgcaagcgttgtgatttgcggttgtatcttaaaagccgctttggacattttcagagaaagcattaacaaaatggtggatcatagctgtgacaacactactgaaacaaagattcgggaacttgtacttcaacagcaaggggttgagggtattgacgatttaaaaacccgcatgtttggagcgaaaatgtatgtagacattgaaatattagccgatggcagtttagttctttatgatgctcacagaattgccgagggagtccatcaggtgattgaacacaactttccacaatgtaaacattgtatggtacatgttaatactaatgaacttctccattctgcataggacggggaagatgatttaagggcactgaaaggaggtgaagtaggttatggaacaatactggtggattatcattgttgcggttttgattgtcgttggcttacttaaaatggttattatgaaaaaatacaacgataaaaagaatcccaaaaagcgttcgcataatgatgaagattagtaaagagcaactaaaaaggaaaacagctatctgtgtagcagcgcaaaacggcagttgaaataaaaccgccgttttcctttttcaaaaattggattacggagggtgtattaaattcgcctttttttaggacacggcggtatcaaggaggtatgaagattttgattgggatgaggaataccttggtgaagatggtttgcttcacgggcaggtggctttaccaagtctaaaagtattattggattggtatttttatagggaattggtagacaagtatgaacaggaggaaggtgtaaagcctacctatgagtggtatcaggacaccttgaaactgtaaaacttctgcaattaaatctacaatatccctttcatcatctactaataatattttattgcttattttatcacttcctttcttcaatcaatatctgtttgtctttatacgttctctctgcgcaggacgcagggaaatactatttttcttctgctttgttttagcttcgcccggtgttttagagattgcaatgataaaggctgaaatcagcagcattgcgctaagcgacgcaagccccaatggaacgcttgctttactttttgcgctgatatatgatgtggtgtcaaaaccaatcaccgtaaaagaagctaaaaaaggataaatgtttctaagcaggccgcttttaaaaaacatactgcaatagcccaatataaaagcgataaccgcgccgcccataaaaaatcccggtgttctcccacaaaatgcgataataggaagaacggcaatataaatgcaaatggaaatccccaacatataaaataagccttttatcaaagcaagaatatcgaaaccgggaagccccgcaaaaatgccgacaatgattgtgattacgaaactatacattcccaatataagggataaaatgcccatagcggtcaatttccctgttaataatttagaaaatgaaacaggaacaacaaaaacatttttcaatgtatcgtccgtatactccctgtttatcagataaccgccaatcagagtaaaaataattggcataaatactgtcgcattgttccatattgtactgtttactaatgcgctaaggtcaaaatttggattttttgcttcttcaatagcaacattctgtgtgattagcccaagaatgggggagagagccattcctataatgccgatcaatagaatatgataccgctttatcttttgaaattctgttaagacaatagataacatatgaaacctcctgttatgcttcctgtttttgataaacccgtgcaaccaatataatacatacaaccgcttccgcaatcagtaccgcaaatatgacaggtgttgatacaaagtacgggcttagacggttgtaaaagtctgtcataatctccccttccggtatcttaaactgatacagccatctaaaaaccataggtacaggaataaatgtactgaaatttagccctaatggtttcatcataatggcatcgcttaggtgcagtgcaaatccaagtaatgtatagaagaaagcgattatgacagaaataatataggacttattgcaccagaccacaaggatagtacatggcagagctgccgcccaaagcaaaatccccgtacaaaacgtaaggaatagctgtaaagcccacccatttaaaggaataccctgtgcaaaagcaattaagataccaacacaaaatcctaacagttcataagcaactgaaaacagaaaaagtacagtaatctttgctatgactaagtgactttttgaaattggaacgcaaataagattttttaaggtgtcgttatcgtgttcttcaaaaaacaggttagcagctataattaccaatatcgggatcagaagtaagaaaccgctttcctcacgcacactgctcataacgtctgctaaacttccctctgataaaagcatgatattaaaaacagggaataaaacagtcgtaaagagagcaattttaaataagcctttccgctttaacttccaaaattcacactttacaagatcaagcaatcccctcaccccctgttacacgcttgaaataatcttcaaggctttcttcgcagacataggcttctgatacggtaagcccgttttcgacaaaggcggttacaatttccccaactgaaatatctaaattatgcagacgcatcttatagtcgtcctgtatggtaaactgcgtttcatggaaattgcgttctaaaatccttgccgcctttgttgtactggaaacggtaaaacggatatgtctgctgctctttgcttccagttctgcaaggctttcttccttcaataatgcgccgtggtcgataattccaatatcatcagccagcaatgcaatttcggaaagaatatggctggaaatcaatattgttttccctctttcagtacagaggtcacggataaaagagcgcacttccgcaattccaatcgggtcaagaccgttaatcggttcgtccaaaatcaaaagctccgggtcgtgcataatggcaagggcaatcgccaatcgctgcttcatgccaagggaatattgggaaaacagttttttgtctttatagggaagccccactaaatcaagcgcatttttaattgcattacggctcggcactccccgtaaggttgcaaaaatgcgtaggttttctgtggcagtcaagtttgggtaaaatccgggggattcaatcagactgccaatccggggcaacagctttttctcatttgtccgtaaaggctttccccaaattgtaacttccccggaagtgggctgtgtcagcccaagcagcattttcatggtcgttgtctttccggctccgtttctgccaagcagaccgtagatgcgtccttgccttacatggatattcaaatttgcaacgcttttctgtgttccgtattgtttggtaagattttttgtttcgattacatatttgctcattgcgaaacctccttttcatatttgctattctatcacgctaaccttgccaaaaccttgccgaaaccttgctttcttcatgcttttacagttaagctaaattttacaaactgaaaaatctccgtattattacagggatttcggaagtaataaggtaaatgtagtccccctatcgggagtgctatcaacggtaattgttcctttgtgagcagctacaagttcttttacgattgataagcctaatccatttccaccagcagaccgtgactgatcgcattggtacattctttcaaaaatatgtggcagatgatcgggagatattccttttccattatctgttatagtgattttagcttgcagattatcttcaaaaacatggaatactattttatttcccttactatggataaggacattctgcaacagattgttgaggatgcggctataagcgtttgcatctatacgcataagatattctgcttccggtatatcaaacgcatagtcaaaattactattttctaaaacagaaatccaatcaactataatattccgggataattcgtttaagtctaaattttcaaaatgaaaaatctgttctccggagtccagttttacccactcaaagagattttccacgaaatgctttaggtagtgagctttctcaaatgcaacatgtacatattcgtctttttcttctcctgcaacgatcttacattctattgcttccaaataaccaaccaaagaagcaaggggagtttttacatcatgggaaatacttgtcattaaccgtttatatgcctgttcagattgcttttgcttgataagctgcgtttggctgttcgttgcaatatcgtttatatcatagcaaatttttcttgtcatatcgttttttttagtcaacatacggcggtttaaattcccggattttatatcttcaagggcttcttcgataatagatagttgcccccgtacacgcctaagttttgtaacaagaaacaagataaataaaattgcgatacaaaacgcaatcaataaagacagattaacattcatgttatgcctccctgttaaaacgatagcccacgccacggacggttaaaatataaaaaggatgttccgggtctggttcaattttttttcgtaatttgctgataaaagacatgatattgctatcatcaaaagcatattcttcttcccatacatgggtataaatctgctttttcgtaaatactttccctttgtttgccgcaagaaaagagagcaggtcaaattcttttcctgtaagttccacttgtacgtcattcataaaaacaagacggttaagattatcaatcgtcattccttgaaacaccgtacaatccgtttcggtgctgggaattggattgagcagggtataacgccggataagggaatttacacgcgccataagctcgttaatgctaaatggctttgtcagataatcgtctgcccccattcgtaagccggacactttatcttcctcgtcgcttttagctgtgagcataaggacaggaacattgcttgtctgccgtatttgctgcaacacttgaaatccgtctaaatcgggcatcataatatcaagaatgataagtgaacaggtatttttgatatcccccaatatatgcaagccctctatgccgccgcctgcgacaaccgcagtaaggttttcctgctctacgcattttttcataagtgcgcaaagctctttatcatcatcaataatcaaaactctattcatgttttttcttcctttctgctttcaaccgggcatccgttggtttctctgcgtcctttggtatcagccatagccgactaaattttgccacacccggtatgcggttttcctcacatagcttttgcacccgtctttctgaaatgccccatttttgcgccgcttccggggcagaaatatactctaacattttcagtctctctcgctttctataagttctatcactataattatatacggttagccgaataaattcaagaaattaaatagtacatggcatttcccaaactttgggatacttcccaacaagcaaatctttccggcaagttatacgggcgggcagatttacggaaaagggtactcttttcctatgcttgctccgaaacttattttttctttggtagcttttatccgttcgcttccattccagctgtggtactgttttcccgtcaaagggagaggggttaggagaacggaaaggaagggaaaggaaagggtattttgtatatctgtatttcttttctctttacttagtaaattagtatttagtatatcttcatttaattgcattggattttccgatgtcggataatccggtatcggaaaatccaatatcgggcaagctcggttgagattctcttagaaaacagccatagcttcagcactccttttgctgtgggtatgttacgcaatagaacgtcattttgccggggggtaggtataaatctttatctccggcagaaacacgcccgcaaatccgcttgtagcaaggctctttttgcttctattgcgtaacatgaggggagtaacaagcggcgttcctattctccctgctttgggatagagaaacgccgtgtctgtgtcgtattcagttttcatttattctttcaatgctgtactgatattggggcttgcaggattccgggcggcatatcaaggctctttccctaaaagtagtaaattggtagtaaattcaacttgaaatcctgcttatatgcccgtaaatcaaggcttttttgagataatcaaccattgttttcataaaaatcatttaatattgtacatggacacttgtatacggtttaccctcttttctttgctgatccacttcggagctagtggtaaaatcatactctccatattgatgatgaaacacccttgcaatttccatttatgtggataggtacggcattgatgaaagctatgcttagtgaaaaaggctataagtggacttcattagcagtataaaaggctaactatgctctgagaatgtaagaaggttggttttgagcacattttttgatattcctattacagctaacaggcaaatggtgcgtgatgatatttttctttgtgggaaaaagtgaggcgggaaccatctgctgtaatgtgtgctggcagcttacaggagtatccatcgcttgtttgctatatgatgccaatagtgaaaggtttccaaaatcccgcatatactgtatcaaatcccctgcatgaggtacaccatggcggactgccctattaactcagcctcagagactattgctgactttatctaccgtaatggaagccagcagcaatttcctggtaattcggaagatattccctgtatggactttgtaagcactgatttcagcattatatataccccgctagataccgtagaacccatatcactaagtaagtttacctattatagtatccctggactgtacacactgttagatagttccagcatggacgcttccggcattttggcaacccatgcatcacctgcccttagcaatcaagggagaggtgttataatcggcatcatagacacgggaattgactataccaatcctttatttcgtaatcaggatggaactaccagaatcttgagtatttgggatcagagccttccagaagataaaagcctccttcctgccggtgtacccaaccgctataatgccagcggggcaagctatggcacagagtacacgcaggagcagattaacgaggcactggaatctgataatccgtttgccgtggtgccttctaccgataccaacggacatggaacctttttggcgggtatcgctgctggaggaatcctgcctaatcaggattttacaggagtagcaccggaatgtgaactggtaatcgtcaaattaaaaccagccaaacaatatctgcgcgatttctatcttatcagtaatgatgcggatgcttatcaggagaatgatataatgatgggcattaagtacctgcgtgtggaggcatacagccagagaaaacctctggttattttactgggaatcggctccaatctgggcagccatgaagggacgtctccattgaatgtaatgattcaagatatcagccgatatttaggaatggctacggtaattgctgcaggcaatgaaactggccgggggcatcattacatggggtctgtaccgataggggaagagtccgttgaggtggaaatccgagtagggaatgcggaatcccaacgtggatttgtagtagaactctgggccgacaccgctgatacatattcggttggatttgtctcacccagtggtgaatccataggccgcattcctatcataggcagaaacgaaacctctatcccgttccttttggaacccacggtcattacagttaattaccagctgattgagacaggcgcaggcaaacagcttgtttttatccgttttgcagccccaactaatggaatttggagaatacgcgtgtataatacccagtatcttacagggcaatttaatatgtggcttccggcccataccttgatttctgatgaaaccgtgtttctgactcccagcccatacacgaccataaccctcccgggagattctccctctccaatcacagtaggagcctataatcatttaaataacagcatctacattcattccggccgtggatatacaataggcggattgataaagccggatttggcagctccaggggttaatgtaagcgggccatcgatagggcaaaggaaccaagactccattcccatgactacccgaaccggaacctcggttgctgctgcccatgttgctggtgcagtcgctaatcttttaagctggggcataatagaaggacataacatagcaatgagcgaagccactgtcaaagcatttttaataagaggagcaaaacggaatccagcactatcatatcccaatagggaatggggatatggggctctgaacttatatgaaacttttttacggttaagagaaataagatgaattatctaaagcatcagattcttatgcatatcacggatacgggggaacttgatggaggttttggctgaggtgctaaaaaatagtcttatcggtggtaagggattaattttgaggtagcggtgtgccgccacaaatacgcttacaccgtatcggtcaacgccttttccctttatatttcatgtagaggacggttggctcgatatgctttttcagagtagccaatcgctggtcaatggggttcagcttaacccgtatatccatctgcctcccaatcatggacgaaaacttttcatcaagtcagaaatggcacggttcttctgaaaatagttgaacaaaccatatgcggaggttaaatattgacacatactatatatagtgatatcatgaaagtagtactgatttgtgtgtgtttataaaccacattcaaatgtttgttccggtggtatctataccggaagctaatttttaggtgtaagccttttatatgaacgagccaggcagagtctctgtctgtaaagtaagatatcagaaatctttgcgaatttctgatgtcttatttttttgcttccaaaaaggagagtgggaatttaggaaaagataattaaaaatcaagtaaacagagacaagaagtataagacgcctgatatctggaaagagaacaaatatgagatcagagtattttattaggaggatgtatgagatacgattacaggaagattaaaactgagaaagtagaagtcaaaggtattgtttgcgaattctatgatatgagaatcgacagagcaacagtaccagatggaaaatatctgtatgaggtggcgggcgatgacgacagcggggcagaaccagcaagggtaggaaaaggtgttctggttaatttttatggttccctaatatgcaaccaaccactattgttggaggaaaaagtaatgtggttagaaacaggagaatttaaatatgtttaaaatgaaaaccggcagatgcacactactggatagaacttagcggggaagatttctctgcttgtaagtaagacatcagaaatttgaagaagtttttggtgtcttactttttgaacaaaaaggagtgaatggaaaaaagaatgagaaagagcagtcaattatatagggcagggactgcctgaaattatgcctgtggagatagcaggttacgtggtcgatgaagcagaaaatccattggctttagacaatgaggagttcactcctaaaaatatatcaatcaaaatgtgaggaaaattcgtcacgtaagccacgaaaaaaatcgtcaaaattcgaattgaaaattatggataatgctactaactcgctaacttttatattcatgcgattggtttctaattttgcataagtgctcttagaaatattaagattcataagatgcaatttggcaacagtttcatcttgtgttaaaccagctaaatgtcgcagaaattgaatgttgtggccaatatccatatctggtcttagtttttgcatatataatccccctggtatgtctgtaagtttcgtaataacgaaatatattcttgattttataaccattaagaattataatgtttcgtgataacgaattttatacaatggggtgaaaaatatttatttatgaaaaaggctgatattgaaagattactgttttactacttatgcggaaatgaaacggcaaaagaaatgtctcaaggaaataatataacgtatgaggagttcgatagaattacctatatactcatagagttgaaattctataatttattaatggaattttgggatgaattttataatcaattccaagaggatattgataagtcagcagaggatttttctgatagctttgaacgtgaaataagcagatgtgaaaaatggctatatcaattttgtaaagaagcaccaacacaagagttacaaggaattttaaaagaaatatttgatatatcataatagatatatccaaagatggagaaagaaaggaattacgccttactttttttatggaatatgaatttacgcattacctatgagattatgaaggagaagatgtctctgcttgtaagtaaggcatcagaaatttgaagaagtttctgatgccttattttcttggtgcgcccggcggcgcacgtttctaaccggtgcaagtccggaatccgcccggtggtgggaaggatatagccgaaggcaagggtgtccatcgtgaggtggaatctgaaggaagctggatatggggaacatactaacccatgggcaaatctctggtctgacgaacagaaatcacatcaggccatgcgtgagggtaaggctgccaaacaagtcgaagcccaataaccacacggaatcatgtatggtaaatgtggcagatagatggagagaaagaaacgtgtggtacccggggaggtctgtgcggaatgtcctgaaagggataaccactatcgtgaggtagtgctgaacgtacagaagtcagcagaggtcatagtagtcgagagacgaaggaccgaatcaacaggagtctttagtacaaccgggaaaggaggaaagaacattgggtacagaaaacagagatagctgctcacaaagagacagcgcggaacgtgaagggtatgtgagagcgcaccgttctttccgccggatatggaaggaaagagacagtgcacagccggaactcttagagaagatactgaataaggacaacttaaacagagcttttaagagagtaaaggcgaataagggagcgccgggaatcgacggaatgaccgtagaggaaacaggtgactgcctaagggaaaatcaaaaggaactgatagagagaatcaaaaggggaaaatacacccccgacccagtaagacgagtagagattcccaagccagagggaggaatgcgaaagctgggcattccaaccgtgaaagaccgtatcttccagcaagccataggacagcagttaatgccagtctatgaggcgctgttctcggagaacagctatgggtatcggccgggaagaagcgccagggacgccattttaaaggtaaaagagtatgcagaacagggatacacccatgccgttgcattggacttgtcgaaatactttgatactctgaaccaagaaatgctattaaatatcctgcgcagagatgtaaaggatgaaagggttatccaatggataaagagatacctaaagagtggtgtcatggaaaacggtgtagtcatggagacagaggaaggatcgccgcaaggaggaaatctatccccgctgctggcaaatgtctatctgaacgagttcgaccaggagtacgagaaacggggagtggcttttgtacgttacgcagatgatatagtattgttagctaaaagtgagagagccgcaaagagacttctggaaacaagcacgaaatatctggaagggacgctgaaattgcaggtgaaccagaagaaaagccgtgtagtaagtgtatttgcaatccgaaattttaagttccttggcttcacattgggaaagaacggaaagggcatttatgtccgggttcatgggaagtcatggaagaaaatgaagtcaaaactgaaagaccttagttcccgaaggtctgttcagagcatacgcccatcgttagaaaagataaaggtgtatatgcggggctggctgaattattatggagtagcagatatgaagaaccgaatagagggactgaaccaatggctatatcacagaatccgaatgtgtatatggaaacaatggaagaaaccgaaaacgaaggtaaagaacctgctgaaaatgggggtgccgaaagaattggcatggaaggcagggaacagccgaagaggctattggtttaccacacaaacggtagcggtaaatatggcaatgacaaaagaaagactgataaacagaggctattatgatttagccacagcctatcagtccgtgcacgtcaaccgttgaaaccgccgtgtaccgaacggtatgcacggtggtgtgagaggacgggagttaatcactccctcctactcgattataaaaaattagacttgacaagcgaccatcggtcgctatataataaatgcgaaacaagaagcgaccgatggtcgttataaggaggtatcataatatgccaaaaggaattatgcttacaccagaacaacaagaagagcgccgagaagaaataatcagtgttgctatgcagctcatagagaaaaatggattccaaaaaacttcaatgagggaaattgcgattttagcaaacatgggaaagtccagtctatatgattttttcaaaacgaaagacgagattgttgtatatgcagttgagaaagaaatagaagaaacaattaaaaaggttcataggattattgccgatgaatcctcgccggaacagtgtcttagaaaaatcatgctgaatcatcttggagtaccaaagcagtatcgaacggtgctgatgtggttaaatacagaatctgactatttagaagaagattatcgaaagcggctgaaaactgcgcgttacgcatatcaggatattataaaatctgtaattgaaaatggagtgaaatcaggcgtcttccgtaagacgaatgccgatcttatgacgcatttgttaattaactccattatatcaatcatttacacatcccgaccatcagccagtccggagaaaatgcttgatgaaacaatggatatatttctacacggaattatgaatgatggaggtgagttattatgatttattataccctacccttgttgcataaacaggcaacccttgaaatggtcggcggaaaaggtatgtctttatcaaaacttttgacagcgggtatccctgtgccggagggctttcatgttacgactacttcatacaagatttttgttgaaaagaaccatattcagcctcacattaataagttgctggacggtattgactctaacaataccagccagcttgaaaatacatctacgcagatagggatgcttttccataatggagaaatgccgcaggaagtatcagatgcaattaaaaccgcatatgctggattgggaaatatagcggtggctgtccgttcctccgcaaccgccgaggatttgcccgacgcttcttttgcaggccagcaggaaacctatcttaacatacaaggtgagaatgaagttcttgacgctgtaaagaggtgctgggcttccctatggacagcccgcgctattgcttaccgcgtgaagaatgatataaagcaggaaattgtcgcacttgctgttgtagtacaaaagcttgcgttttccgatgcgtccggcgttatgtttacgctaaaccctatcaatggcagacgcagcgaaatgattgttaacgccgcgtggggacttggcgaatcggtggtttctagcttagtcacccctgatacaatcgttgtagataaagatgctgaacgaattgtatcgtatgaagtagcaaacaaagagattatgacagtccgcaactcagatggaacagaagaaatcccaactcctgaacagtttaggaaaaaacatgctcttactcgcaatcaagttatgcgattgacacagcttggaaaaaaaattgagaagtattatgaaatgcctatggatgtagagtgggcactggaaaaagataagttgtatattgttcaggctcgccccattactgtcctaccgccggaatggacgttaccggaaaaggatgttatatatacaagaggcagtctagcggaacacttgccaaatcctgttacgcccttattcgccacacttgggcttgaaatagtcaaccgtgcgtcggcgcttttatggatagatatgtttggtaaaagtgcgaaaaagctactgccagaaaacggagcatatacgattattaacggatatgtttatctttccgctaattcaaagcctcttttgattgctctcaaatccctttccccccgatctttacgccgtgcgctcacgaacagtgttgcacgctgggaaacagcacgaaaagaatttgaggatgtgattaaacaatgggaagaaaagcccatgcatatgctgaatgctcatcaaataatggaggggattcagactgtattttatggagcgtgtatttatttcacgaggattcagcttacattaccagccgcctctatcagcgaaacattatttacaaaattttttcagggagcggctcgtcgcgctggtataacagatacttctgttttcctgcttggatttgatacgattgctctgcaagccgaaaagaacctgtggagtctctcggaatgggtaaagcaaaataatactctcaatctttatctgcaaagtaatccaacagcaaagatagcggaaaattttatgtcctcagttccgcctgacggagtttcgctggaagtatggatagaatggaaaaatcgaatcaatcagtattttaaagagtttggtcgtaccgcttatgaatttgattttgcatattccacaccgcaggaaacacttacaccaacctttgaatccataaaaacctttgtagaaggcaaaggtgaaagtccttttttacgtcaatccaaatttgaaaagcataggaaacaggcagaagaagaaattttacaacatataggtagctcacgcaaaaaactgtttttgaagttgctccattgggcgcaggaaactgctcctatgcgtgaaaatgctatttatttgatgggaatggggcatcctctgattcgccggatgtttcatgaaatttcagcacgccttatacgtggcggagctacttcgcatatagatgatatttattggctcacaaaattggaattggaaaaactcataatacagttagacgaaaatatacctttatccgatagaagaaaatcgatacttgagcgaaaagcggaactcaaaaagtaccagggctatgtgccaccagctcagttacctgagaagaaagtaaaaagcatatcacatgcaccacagaaacaaaaagatggaaaaaccgtgttgaggggtataggaaccagttctggtgtcgtgacagctcgtgcctgcgtactaaatagtccggcagattttaaaaatttccagccgggaagtgttttggttgccgttactacaactccggcttggacacccttatttgcctctgcaagtggaattgtaacggatattggaggtcctctcagtcattcaagtattgttgcacgggaatgtggtatccctgccgttatggcgacacacacagcaacgagaagtattaaaaatggacaaatgataacggtggacggctcggaggggacggtgacgattgatgaataaaaagccgattttcgctttaaagcttgctactttggtgattgcgttaggatatagcttaattcttccggtcatgccattttacatggaaaatctaggtgctggcggccgtgagcttggatggctcactgccgtatatgctctggcacaaacagtatgcgcacctttttggggtgcactgtccgaccgaattggtagaaagccgattatcagcattggtattataggatattccatcagtttgttcctgttcggtttggcttcatccttttggacgctatttatagctcgcagtttatcaggtattttgtcatctgctacgtccgttgcatctttggcatatgttggagattccagctcggaggaagaaagaagcaagaatatgagtcaacttggagcttcaatgagcgttggcgtaatgatgggaccattattgggaggcattcttgcaggctattcgcttgcgctcccattttttacaggagccggcatttcatttattgcctttctgctaattctaacacttttgccagagtcaattgagcgttcaggacagacggaaaaaagaaaaccctttgatttttcagacctgaaaagtataatttttggctcagcaggaatggttttgatacttattttcgtcgtgcatttctgtcaaacaggcttgcaaggaattacggggctgtatgtcgtagataagtttggattttcctctaagcaagttggtgttatttggatggctctagcaggtattttgattgtagtacaaggctttttgactggtcctttatcaaaaaaaattggtgagaagcgactaatactgataggtatgttttgcaaagccttagtagcgtttgccatggtattgacaactgggtttgttagtgtgttggtggtttttggcttatttgcggtatcttctgctattacagtacccacattaaacgcaaccctttcaaaaactgacaatcagcataaaggaacactgatgggatttgccagtaccgccggaaatcttagcaaagttattgctcctttattaactgggtatctgtatgaaagcaatattgaattaccatatataaccacgggagggatagccttaatcggagtggttatctgctgtatctggataaaaaatcaaaagaataaatgatggaagaggacgtttacttaaacctataatatccttaattcacgtccccagacaatctacagtacatattaactgtctggggtgttggctataaattcaacaaggtaatgatttgaaaatagaagaatgcaagaagatacgaaattgataaatttgaaattatgggggtacataaccatgaaaaaaatgattgcatattgtggactggattgtgaaaaatgtgatgcatatattgcaacaatcaatgacaaccaagaattacgaaaaaaaactgcgaagctatgggctgaattaaataatgcacctattcttcctgagcatattaactgtcaaggttgtcgtgttgacggaattaaaaccgtattttgtgataatatgtgtggtattcgccagtgtgcattagaaaagggtgttgctacttgtggcgattgtttggatttagagacatgtcccactgttggagaaatcttagagaataatccgtctgctttgaagaatttgaaaggataaatcttacgagctatttcaaggaatgccaacaaaaattgtaactgaccatgatgtgatagatattggcggacggcaaattaaagtgttgcatacacttggacattcaccagggcatttgtgttttttggaaaaagacaaaggatacttatttactggcgatttggtatataaagatatactgtttgcatactatccttctactgaccctgaagtatatcttgcttcattgaactaaccgtgtgattaacatagaccaccagctattgcgtgatacagaggtgggttactatatttccacacctaagactggtatgcgaggcagggaaaggaatgggccctcaacaagttgcatggattggatcggaatggaaaaaaatccgagtatcggcaggggtatacaaaatggctaccactgtatgaatcggatattctgatatcacactactgctgtgttaagcagaatgaggagccgattgccctgtatgagaagcagactggacggcatcccattttagcacttatggcagaggaatctgccaggcgcaaggaagcatatcttcgtactggctgtaatagctttgaaagcgaaaggccacttagtaagccaatgggattttggagagcacaggatgtgctccggtatacagtggaaaaacagttagaaattgcagagccttatggtgaggtggtcgaagtggggtaagttcccggtcagattgggttctttccatcatgtgggccgtttaagtgcacaggagaacaaagaaccggctgtctgttctgtccagtgggctgtcatctgacaagctttgaaaaattcgtaaggctgaaagcatataatcccaagctttatgatttctgtatggaggaattgggagagaaaaagctgcttagctggatagagaaaaactataggagaggatataaacagatttcatgatattacacagtagagaggatatgaagaattgatacgatttagcaatcacatgggattgaatagctatatatagatttgaaatattgacaaacactatatatagtgataaaataaacatgacattgatttgtgccgcttttttactaagcgcattggaatgtttgttccgggcaaccggaagctaagtttttcaggcatgagcctaacataagaaagccaggcagagaagcaatctctgtttgtaagtaagacatcagaaatttgaagaagtttctggtgtcttatttttttgctaaaaaagaaaaggagaaagaaaaaatgaacatggaaacgcgtaagacaagttttgaagagaagttaaaggagaacttgggagcggaatataaagcgacatttccgcagcgaatggaaaaacaggacgaggaatttctcagagttggagtccaaaaatccggtgaatcagctggaatttggatatacctaaacggcagtgagtttcattggctggataatgaggaagacattcaaagggcggtaacaaaagtgatagaagagtacaaaaaaaagagaggattcttaaatggtccatatctcacaggagatagctttagcaacgtaaaaaacaatcttgtttgtgcattggccaatcgcgaagacaatgaggaagtgctgaagtatataccgcatatcagatactacgacatggtggcgtacttcttgatttttattacggtggatggagaatcgtatgttagaaccgtggtaaacgaggatttagaccggtgggaagtggagctgcaggacgtgctggaaacggcaaagtcaaatacagatctcaatccaccggtgattgaaatggttgaaattaaggactggaaggtgatatcagctccaataggaaacacatttggtgagatgctccaatctatcaaaagccatcaggaacagaagaaccctatgtatgtgctgtcaaatcaaagtggcctgtatggagccagcaatatgattgacaatcatctgttgggacagatttcagagagctgcaatgacagcctccttatacttccggtagacattcatgagattatattaattccgtccagaaaaaatagaacttctattgcggattggaaagctgtgatacatgccttaaatattgaaaataaaggagtgaagctttctgaccttgtatatttgtttgaccgggcggataagaaactgcatgtagcaacaaatgatgattttcaggcataaagcctggacaaaaataaaagaaaggaaggaaaacaaatgaagttagaagcaagatgggataacgcagggagagaccagctcacaatcggcgaaatggttgagatgggaaaggatggctatgagtttgttatcagcggaggccatatcgtatctgttctaattaacttataaggagagggcgcatatgaattttgcagatgatttttcaaagacattctatgataaggaagagtttctcgaatttttggatgggattgagtgcggggcagaatggcagaaacatcccaccaatactgttcttgtgattgccggagaggaagaaccagagatttgcgagaagataaaggacatggacgagaaagaggaaatcataaaagatacaatgaagaattccggcctgttcttatgccttggcagtacctattatccggtcggacagaccaccatgaagtcaatcgagagcagggccaggattgcaggttctgcgctattggatttgccgaaggggaaattagcccgggtattaaatgactgtctgaaagtgacaaagggaaatgctcttgtgagaattcatgaaggaaaggtgcgcgcggtacatggcggagacccaagtgactattccgtcctgccaatgccggaattatttgaagtagcatctatctatgttgcagaaaactatgacaaggctaccttttcaaacggcctgttcagtcattctctggcaatggcgtcctgggaattggaagaaaaaggactcttggatacataccgggaactgctgctccagtatggcttacaggcagataacgtattatcagctttgattcgtgtccagacatccgatgttggcgtaagtggtgcgaatatctattattctcttctgctgggagcagagaagaagccgttgattttaggaaaaccattgaaattggagcatacgaataatgcatccatagaagatttctctcagaatatgggacagatatttgccagatatcaggaggccattggtgatttgtcgaagctgtttcatgtatatgccagctatccggctaacgttatggctagtgttatgattaaggctggtatcagtaaggcgctgacagcccagacggtagaacagtttaaggccggacatggaccgggaatctgtaatggctatgatatttattgtggaatctgtgaggcgatttttctggcacagagcaatggaatgggtgcaaaggcattaaccgatttggaagagatggtttcacggtgcttgacctatcgtttccatgaatatgatatcccaggaacgattctgtactgatgaaagaaataaggcagggcagggaaccctactgctctgtcagaaaggagacaatatgctgaacctgaattatgaaccagatgtgctggtggaggatataacaaccctatcccatgacgaatggaaattatacagaacactggggattggggggagtgatgcggcggccgtgtgcggcatctcgccatggaaaacagccagggatttatatgaagagaaggtacataaaaaaatcaaagaacagaatgatgatggctgggtagcaaaggaaatcggaaagcgcctggaggaattggtggttcagatttttatgaaacgcacagataccagaccgtatgctgtgcgtaaaatgttccggcatccgctgtatccgtttatgatatctgattttgattttttcgttaagcttgatgaaaagatctatttattggagtgcaaaacctcgttcagttaccaccacatgaatggctgggaaggtggaaatattccgccgcactatgttctccagggcattcattatatgagtgtggctaacgtagatggcataatttttctctgccttcatggtaaccatgagggttctcttatcatacggcgcctggagcgcgatttggcacaggaagaagaactgattcggcaggaatcgtatttctggaatcagtgtgttgctttaagaaaaccacctaagtatacggagaaggctgacttaatgcttaaaagcatccagggacgctatggtgtgcaggagaataaacaaattgtactcccaccatcatatgcggcaaacatgacgtcctatctgaaactgaaaaaacggaagtcagaattgaagcgtcaaatggatcagatagatgaacagatgaaacttgcctatgcgccaataaaggaagccatggagggagctgaggaagcggtactggaaactggtaatatcaggtatttggccggctataacaggaaagttacaacttccatcaataaagacagcctggaggtgctgcagcttatgcatccggatatttacagagagtatgcgcagacaaatacctcacagtctttttatattaaagaggataaggcaagttaggggaggaaaacgaaaatggacgaagaaatgagacagccagaagaaatggtatctgtgatagatggaaagaaggtacaggaaatcttggttggccgatatctcaatgttgttattgtggaccatacggattttatgaagcttatgttgaaggaagactacagaatcaggcataattttatgatgttgattggccagtggtttatatgtttatcctccagtagtgagtgggatgaacgaaatgagggcagtgtgaaattgtcctgtaaactgaaaccagagctttcaaagaccaatttatggccttgggtcacgtatggggattctgcacccaatgaagtttcggtcagcggccaccagacggaatcagttgaacggctgtttgcagcatatttatctaaaacagaatgggaaatttgcaatccatttcgccagttcctggttgctatgcaaaaggaggagcgtacacttcagcagatattgactcggttcgcagtggaatggtgtgactgggtggtaaaagaggaaaaagaaatacagggagaatcttaccgtattgccagtctgattgcatcaataccctctgtcttactataatataggaggaattttgactgataatgagagacattttctggaattaaagcttagagtttggttaagaaagctgaagcgggaaaaagccggttttgccggccatagaactccgaatgactggtcctgtgagctaacagatactgcgaaaaaatacttatgtgatgtggtatattccggtcagggcgtttatgtgcttgcgagtgaagaatctcgcttatttactgagttgcagcaggctgtgactcaggcaaaggtaaaggaaaaactccatcaggcattgtttgtggatatggattttgagatggtacgagatctggcatatggactaagaggccaggtggagacaattatgatggaatacaaatcacacgttaagaaagggaatgaacatggaacaaaagattttaacactacaggaaaaaatggtaaagatccgctcggagatacctgcattggtaaaacgcgcatacagtgaggacgtgaattatgattttataaagattgatgatattttccgctatctgaccccggcaatgaaccgatggaatgtgaactttgaaattgtttcggaatgtgcttcaaagagaaacgagaatggggactctgtctatgttgaattcttagcatattgtcaaatgtggctgtatgaggcagatttagaactaaagtggattaatgcagagaagccagaagacgaggtaaccgttacaatccacgccatcggtacccatgaaatgccggagaaagcaaaaggcagtgcgctcacatatgccatgaaatactacctaatggataaatactgcatcgaccagggcggtgtagacccggatatgcgggattttccaccggatacatatgatgggagcataccggaatatgatggcttgtcctctgatgcatatgatttctcagatcgggattcagaagggatagcaggagatgcctctggaataaccgatatggaactggacgctgaaatggaaggcggacaggaagtaccggatgaattaccggaggaagaaccgatggaggaagctgaggagagcgaagttgatgcatctgaagaacgttccatgatgaatgattcagagatgaacccagaatcagggcatgaggaaacggatgcggaagaaacagtaaaacaacaagatgggggtatggaatcagatgcaaaaaagaccagaaggaagtctgcaaaagataaacagaaggcagataagggagacacgaaccgtccggttctgagccgccatatcatgccggagaatgggacgatggtgaatctgccaaacgaagtaagcccacagccggctgtaaatatgacaattgaggaagctggcaatattgtttgcacatttggtatctataacaataaatgtctgagtgagctgctcaatcagggagaagaaggggtgaaggcgttggagtggatagcctataattaccgcggcagaaatgaaacaatccgacaaggcgccagattgcttttgagcacgctgtaggccgcatggtgaaagcagcgggaaagaatacttaaaagatgtttaacatatcagatgtagcaaatttgttgggaattaagaggctgacggaaggaaattcctttaatgtcgtatgtccgttctgtggcgataccagaggaaaaatgaatttccgtattgtaaaagacggtgagctggcaaatacctatcactgctttaaatgcggcgctcatggaaatatgctgacactctatgcagacctgatgggaatttgtggtgtggatcggtataaaattgcctatcgtgaaattaagacggcgctgcatgagggcgctggctgcagaaacagctatgacagcagcttcacaggaacgatgacacagatagaggaggaagaaacagcaagtcttgagaaaagaagtcagatttatcagagactcatagagatgctgtccctgtcggaaactcaccggagaaaactgatggaccgggggctaacaagcaaccagattgaggcattccattttcgcagtactccagttcatgggactgaggggctcgcaaggaggctgataaaagaaggatattctcttgcgggcataccgggattttacatgaatcaaaaccaaaactgggatattgcgttatatcggaataaccagggaatcctatgcccggcttacagtgtatccggaaagattgaaggttttcagatacggttggatgctccccatgatgataaaaagtatttgtggttaagcagtaccaataaaaaacgtggtgccggcagtaagagtccggtcagttttattggaaatccatttgacaagacggtacgggtaacggaaggaatattaaaaccgattgtcgctcatgctttatccggatacagctttttggggacaccgggagtaaaccagtataagagccttgagaaggcattggcagtcctaaaggagaacggtcttgagatggtcatggaatactttgacatggacaaattcatggatatcggctgctatggtgattataagtcctctatttgtggtaaatgtcagaacaaggagcgttactatggaaggaagatttgtgaagagaaacggaaaaagcgggaccagattcgtgcggggtgctgcaggctctatgagagctgtgaccggctaaaattaaaatgcatccgcaagacctgggaccagggagaagatgggatttgggctggaaatgataagggaattgatgattactggtggtctggcctgaagaaaaaagaggagcagattggatatgatgggatggacagaacaattcatcatcgaagcaatttgccgtcatacggaacaagagttgcgtagtgatgagacaaaaacagagagaatgaagcttagtgcctgtagcgccttagaaagtatcagaagacgtgtcaatggatacggagcagagtgttttgcatttgtcctgttggttgggattatgttaaagaaaagtcagatgatactgaatgcagatacaaagggggagctggaagcgattttagagccttccgtaccccggtggaattacggaggatttctaacaggtccctatcatgtaccggaagaagaagcaatcttttggtcgaaagcttcattggaggccccgttgaatgatgaaggagcaagacggtaccgggatgtggctgcagtagcctttccagaggagatggctgaaatctggggaacagatgatacaggagaaggcggcattgccgtataaaaaggcagggagagaaaccatctttccgtgtctatttttgcgcatgaagctaagatggagcaatccaaaagtgggtttgtataaaaacgaaggaggataacaaatgaacagatgtatatttgtgggaagattgacaagggatccggaggtgagtttttcagagaaagcccagatgtcgattgccagatttactgtggcggtggaccggataccaaagagagaaggagaaccagaagcagacttttttaactgtgtggcattcgataggaaagcagagtttgtggaacagtattggtacagtggtatgcgtgtggtggtaagcggaagaatgcagaatgataactacacaaataaaaagggagaaaaggtatatggcgtttctttgaaagcggacgatgttgagttcgctgatggaaagagagaggcagataatgggcaggcgcagagcacggctccgtccagagcagcaaatcctgcaaatgcattagcggcacagatgtccaaagaagctccggtgacgagaaatgcaacacaggcacccagagcagccactgcggcatccagagcagcagcgccagctacgaatcagggcgccgcaaaaccggctgccagcagaaatacaccacagcgtcaggcacctagccgaagcgcggtaggaagaagcgcatcccagcgaggggctgcgagggcagctgccggcgatgactttatgaatgtagcgagtggaatggaagaaggtcttccgtttaattgatttaacagtatgaatacagacggctaggatgtgatggcgcattctagccgcctgcttttggaggataaacgaagatgaatgaaaagaaagtacagaaattcatcatggtatttttaatgtgcacagcgggggccgtgatgttacagctggcagctcccatgattttgggacttattgtgaatgcggtatcgattgggattccatttgcagtgtattacttgcttatcagaaaaaaatggagaatcaggataattaaatcatcggaggaaaaagagcagtctggcagtggaagtggagcggccgaggaaggtccggatgatggaaataatggtcaggacgaaacggacaacccggtatatgaatggtatacacggtgcggaagggaacgaatcaaagcgatatctaccaatatatttgcacatggaaaaaatgaattttggattcgtaccgatggtgtctgtaatatccgcaccccaaagggttacagacgggctggcaatcttcctggatatccgggcgcgcaagccaataccattaccgaatatttaaagcaggacggattttatgcagtcaatgatgggagatacatttatgtttcaaggtaagcgggaggaagagaaccgatggtatgtaaatttaagagccgactgtatataaacccggggaatggttataccgtggctgaatacagcagtatggagctggattgtattccaagtgaagcagtcatatccaattatggaacagaggtgacgttcactgcatttggaaaagaacttccttgtatggataatgtagagattgagatggagggagactggaaaaggtccgagaaatatggccttcagttcggtgttgactggtccagggttctccttcccaaaagccgggagggaatcatcggttatctgtcctccgaattgattacgggaatcggcccggttatggcaagagagattgtcaaccggttcggaaccgataccttcactgttatggagaatcatcctaatgaactccttgctattaagggaattactgaacagaagctggaatttattattgaatcctatcagaagagtgcggaattaagggaattaatggcgtatcttgcaccttaccacgtcacacccaaaaaggccgaaaaaatcaaacagcattttggtctggaagcagtgacactgttgaaggaaaacccataccgtctttgtgaaatcaaagggtttggttttattaccgttgatcccattgccagagccagtaaagacctcgctccggatgagcctgaaaggattaaagcggctattcaatatgttttgagaaagggcgctgaagaaggaaatctgtatttagacagtaccatcattgtcgatatggcatataaggtgctcaatgcaggctttccaactgatacagtcaggcgcggacagattaagctggcaggaaatgagctggtaatgaaggataagcttctggaggcagatggaacggctatttatttaaaggcataccgggaggcggagaaagaggcagcgtatcatcttgtcaggctgctccgttcaccggggaacacgtataatattgagcgggaattagaggctgttttagcaaaaagtaaaatgacgcttgcacaaaaacaggaggaggcagtccgaatggtatttcggtcccaggtatccatcatcactggcggccctggaaaaggaaagactaccatcctcaaaattattcttcagatatttgaacgtctggaaaaaaataagtctgtactactttgtgcacccacaggcagagccaggaaaagactttcagagagcactgggtatccggcttttacaatccacaaagcattatatgtaacggatgatgagatggacaatatggaacccgaaatcctcgaagaggatttaattattgcggatgaatttaccatgtccgacatgaagcttgccagtatgctgttttcaagaatcaagacaggagccagacttatattggtaggtgatgcggatcagcttccatcggtgggaccgggagatgtatttagggaattaattgtctccgatgtgattccagttacggttctggacgagtttttccggcaggcgaaggggtcaaatatcatatggaatgcggatttgatgaacagaaatcaaaagaatcttctttatggagatgattttacctttacctatgtggaagacgcatatgacgccgcagaaaaaatttcagaaatatatcaggaggaattggaaagaagcggcggtgatttggatatggttcaggtattatcacctctgcgcacaaaaacggaggcaggggtaactgctttaaataaccggctgcagggaattgccaatccgtttgctgttgataaagcggagtggcaaaccaagtacggtttgttccgtgttggtgatcgggttatgcagacgcataatacagaagagattgctaatggagatattggaagggttgtccagattggaaaatcaaaggctggggaaatggaaatgaccgtggattttggagatgtcattaaaacatatcaggaagatgagttatcaatccttgagttagcgtatgcaacaagtatacataaatcacaaggagctgaattcccaattgtgataatcccggtacttacctgcttttggccgatgctaaagcgaaatatttattatacaggagttacacgggcagaatttcgggttcatcttgttggatcaaagaaagctctctatatggcaatttccaacagtgatatcggcaagagaaataccctgttggcagtaaggttgcgtgcagaggcacaaagacaggggctgattcctggacaagaagctgcataagaaggaggaaatcaaaagatgatgaagatttttgaaaactggacatttaccagagttttgccggaaccatttgcgggcgtggctgcaaaccgcgggaaaaaagacacaacggaggcatcctgtctttccgtccataatcatatgtcaagaatgaagcgtgcaaccctgcacgcttccactttaaaagcactgctggccgtatctgcaattataagaggagaccaggaaggcgcatttggtgtacagacagtgtcgggaacggttaaatggtattgtatggagtacgcaaagcctgtggctgccggttctgaaataagaatcggtgtgtaccatccacaggatggtaaatggaaagggattgtaaagaacggaacaacactggcggcatatccgcagattggtaagcggggggcaagcggcagggaaattatcatgatgttcatttttgcaagcttagcagaaggttctcttcatgacgatgaattttccaaagccttcttgctgttaaacgatgagataaaaaatggatatccggatgcggataaggcaacggacctggcttttctatgctgtgacaatctgtaccgaagaattgtcaatagtgcgtctctcggtgagtctggtattttgtttgacggggatagtattgcgtctggaaatgtaccgttaatacttaccagtcaactggccgatggagattataacccgaccgagacgatatatggaaaatttcaggttctggaatgtaaggactgtgaaagaacaatagcagaattaaaagagcagtatgaccgtaaatttgagcttaccgatgaggaaaaaaatctggttcctaagctgccggaaaaatacaatgtatcagcagaagcacaggagattatggacgcggttatcaacagccccatgcgggttttccttagtgtaggggaagctggcacgggtaaatcaacaaacgcaaaaattatagcacagttgttgggattgccgtactatgcttttacatgcagcgagggaacagatgaagtggatctggtatcttccatggttcccaatacaggtgaacggccgggaaagattcagattcccatgccaacgtatcaggatctaatcatggacccggcttccgctctggcgcagatatgcggattgtacgacaacgaaatcagtgaagaagaggcgtttagaaaaatcctgaccatgttttatcaaaatggatttgaaaatgggaaggatgataagaaatttgtcatggtagagtcccctattgtgactgggtgcagaagaccatcactggtggaaatacaggagccttctgttattaccaaaccaggtactctggttaagttaaatggactgctggatgaaggtgcggcaatcacactgaccagtggagaagtggtgaaacggcatcccgacacagtaatcctcattacaaccaatatgggatataaagggtgccggggatttaatgaatccgttttgtccagaatgcgtatggttcattacttagagccgctcaatgcggaggcaatggtagcccgggtcaagaagaaagtgaaatttgacgatgagactttcttaaagaaaatggcggatattgtttgtgaagtacaaaaacactgcaatacagaaatgattacgggcggagtatgcggataccgggaatatgaggactgggtgtgggcttaccttatacagaaggatatattgaaagcagcaaaatgcacgctcgttgcgaaagcagcgccggaaccagaggaaagggaggaaatttataaaaaactggtgatacccgcgttcacagaggcgcatgcggcataaaaaaatgaggaggaaccaatgaataaaaaagtgcagcaaaaacataatcaaataaaaaatagaatgggaaggctgacggataaagatttttttctgtctcaatcctatcatggcaccatgttaaaatctgtcagattgttgggacagaagaatgatattaccctgttcatggattatgaagagtccgatgacgccaggattgcgtttacaaatggacggctcctctacttaaatacggcgaatccaatcacaaatctgatgacgagccgggtgtctaaaataaagagccatgaggggtttatagcccatgaatgcggccatcttagatgttcggatttcaaacggcggggccggtatgtaagcggattctccagatggcgtgtgtatccaaagcctccacaggtgcagctggtatacgaaagaaaagcctgggaggagatgaaaggatacttaaatgcccataacgtggtggcagcctcggtgatacagaaaaccgcttcttatataaataacgtactggaagatgtgtatattgaaagctttatgtgccagaagtatccgggcagtattcaaaatggaattcaacgtaatgccgcgcttatcattcatcatattccaacgcaggaagcgcgtaaggcagaaaagagcgatggactgactattatgctggatatgattttccgctatgccagagccggaaggacagaggcagaaaaagaatatgataaacagtattgttcccgcttaaattcctgccgtaaaatcattgatgaggcagtggtaagcgctgacccggatattcgcttttatgctacgaaccgcctgatgctaaagttgtggaaatacatcagacaggccattaaaacagcggcaaagagcctgaaaaatgaaataaaccggctttcggaggaagaactgagtaagaaaattcaggagtatttaaatcggaaaatgttatgggtggcactttcagagaccatcggtgcttcggaagaacagaatgaagtggaagaggaaattgaaggctgggacggggagctggaaggggaaccggaatctcaaaatcagaacggtaagaacgaagaattagaaaatgcacttgagaaaatgcgagatgggcagaggcaggaaggaggagaagaggaaacagaggaaggatcggagatcgatgagacattatctaatcttttgcagaaaatagcagaggagaagtttctgctggatgaggaatcggatttaaaaaggaatctggaggaggaggcagcagattttaaattggacggtatccacaaagattcagtgattgaaatgcaccggatgacaacagttccccagggattggaaaaagaatataaaatgattgctccagaaataaaccgaatcacaaaacggctggaagcatcgcttgaagatgtgctggagcggctggagggaggtacgcaatcaggtctttacatggggaaacgtttaagccgtggaaatctgtaccggctggatgataagatttttgaaaaaacaataaaaccggaagatggattttcaatcgcatttgcggttctgcttgacctttcaggttctatgtcatccggtggcaggattgagtctgcacaaaaagcgggtcttgtcatgtatacgttttgccggaatctgggaataccggttatgctgtatggccatacaacccatgatacgggatatacggaagtggtagacatttactcttttgcagattttgattctgtagacaatcaggattatttaagaatcatgagtgttagtacctatgattgtaatagagatggagtagcacttagatttgtaggacaaaaactgctaaaccggccagaggatataaaaatattattaatgatttccgatggacagccttatgcccaaggatataaaggcgaaattgcaaaagcagatttgcaagaagccaaatatagcctggaaaaaagaggagttaagttgttttccgcagcaatcggtgatgaccgtaagatgattgaggaaatatacaaagatggatttctgaatattgcagatttcaatacaatgccagtcaaactggcaggtctcatcgcccggttcatcagatagaggaggagacatatggcagaaagggaaggacgggactggtctaacgtagtatccggtcagattgcagtgtataaaacagataaggcactgttagagctcatggataacttaaaaccagcgtcatatttatttccggctcatatccatgcgtccggagacgtgtcagaagttggggaaaggtccttaatccgtcttaatatgctggattacagcaaaggaacaggggataatacagtgagtgtctatgccaatatcagcccagaagaagctaaatacatatactcggcgctctttaatcatctgtgggaatttgattatccccaggaaaagatttttggtaatccagataaggagggttacagtattgtcacaaaacttaatattgtccggtatgatactgattcccaggggaataaacgtaattacccatggtttgtagaaatacaaaacggacgcggcattgcaatgaaaaattccaatggtggccggtattgtaaaaggaacagttatatctgtgacaagaaagccagtctgtacatcaatgataaagacctgtttatcctattttgcaagacagacgcttatatacgcgcatttgagatggagtatgcatttcgggaaaacaggatcggaaactttaccagcttgtatggtcttttaaagaatgagatacagggagcagccgacagactgctcacttgtatccatagggaagatgaggaacctatgaaaaaggcaggatgatttagttctaaagaccctgtcctgtaaaagttgtttgcttgaataagaagggcagatatgatatattagatttgtaaaagcataaattgtctggaacagaaaggagggcttctatgtgccagatctcaatccgcataccggatgcagttatgtatgatacacatatgagtgaggaggaggccgctgcatttgccagatgtatggtagcagtaggatattatacgcagaataatgtgtccataggatactgtgcccagatagccggtatgacagaagaagaatttattaaatatctgggaaagcggaaggtcagtattttccagtttgacaataaagcagagtttttggaggaactggagaatgcgtagagtgattgtaaattccacccccatcattgtactttgtaatattggattattggatatactgaaggcgctctatgcagagatttgtatcccggaggctgtgtaccgtgaggtgacagagaaagacgattcggcatgtcaggtattaaagactgcattgaattggatacatgtggaaaaaatcgcaaaccagtcagataaaaagatgtataaggcgaagctacacgatggagaagtggaagtcatgattctggcccaggaggggacagcggacgatttagtcgtgatagatgacaatgctgctaaaaaaacagcaaaatatctcggtctaaaagttaccggaacaatcggagtccttttgaaagccaagagagaggggattatcccggagattgcttccgttctcgaaaaaatgaaaaagaacggattttatatcagcgaaagcctggaacaactggtacttgaacaggcaggagaacgacacaatatatagtgcaatgaagttgacaaaaactatatatggtggtaaaatgagtgggaaagctgatttatgtaatccaaagattacaaatggtttttgttccggtgtttaactggaagcatgatttttgaagtaacagaataagagcagctattgtgctgcgggaatgaagagacatcaaaaggaattgttttggtgtctctttttttgtttgcagaaaggaggaagaagccagaaggcggaaaggagggagcggatgagagattcttacaatccggagggatatcattgccttatcattgcaatcttaatgggagtcaatgcaagggaggcccggtttctgtatgaacatggcctgaataatccgattgcccaaaaaatcttaaaaaagaagcatcccaaaattgtgcgggtgtcaacaagaaaggagagaaaagaagttatacagcaactgagaagcgagggttacagtatagaggctatcgcagatattttaaactgtgaccattccactgtgaaacgaaattctaaattgaaaaggagattcacatcatgataacattagaaaaatttgccgaagctgtcagctttgaagtagccaaaagattaggggccggtttccatgtgcatgttctgaaaccggttatcaacaatggcatagtccagacacagttgtgcattgaaaaagaagggcagcagtttcgcccctctattcacttgaaagatttttttgagtgctacaaaaaaggaacagggcttcaagcgattattgatgagattctggaatgctatgcatcggcgccagatataccggctggtatgcaggagattgtaaatgatatgagttttgagaaaatcaaagacaaaatcatgtgtaaactggtaaatacccacgacaacgcttctatgctggagaacatcccaaacattccatatctggatttatccgttatatttttattattatgtgaagaaacagaagaaatagcagcaaccttaatgataacaaataagcatttgaactattggtctgtggacaaagaggaattgtatcagagagcattggtcaatatggtaaataagtatccaccagtgcttatgaaaataacggacatgatgtatgtgttaacaaaccggattcacttttgtggtgccgaagtcttactctatcccgggctcatgagatactgtgaattacatgtgggaaaggatttcttaatcattccttatagtgtagatgaagtgattctgtttccgaccctgggtgtcgaggatgctgtagtttctcaggaactggcggatttgatacagtccattaatgcagaggaagttccggcagatgaacggttatccaatcatgcatatagatattgttccgctgaggataaggttatatgcatttaaggtgactttcattaggataggagaggtttatgcatattcataaatttgcagatatcgcctcgtttgcagagattggggttggagggaatcttccggcaacagaagagtaccgggaattcatcaaaaagctccaccctacacagttcctgacaggacggctgacagctccgttatacgaagtagagtattcctatgtaactgtgcggggaaattaccgaaaggcttataaatatatcctgctgcgtttggagcatgatgatctggacctggagattgaaatgatattctcagactgggtagaggaattaaaccgtaaatgtccataccggcgtattttaaatgcacaaattcttaaaataaagcccatagcgtatgcaacaatcccatttgaaatctaaaaaggttccattccctcatttcccggagaaaactcctggttgccgttaaaggccaggttactgcggaccgaggccttgaaagaagagaggttagcggcgtaaaaagacacaccggaaagaatggcttttccgtcaatagcagaataattgcgaaggacgggagagaatggaacaatacagactttttgatgatttttcagataaggtaaaacgggcaatccagttgtttcagatgtttgaagatactgcggtccggtatcataaggatggttattaccttgccttcagcggcggaaaagacagtgttgtgctttatgtgcttgcaaagatggctcatgtgaagtttcaggcacattatcatttgacaacagtagatcctccggagctggtgcggtttatacgggaggcatttccagatgtcaaggttgagtatccggagctgaccatgtgggatttgattgtcaagaagcagatgccgccgctgcgtacagcacgctactgttgtgaagtgctgaaagaaggagggggcgagggagcctttacggtgaccggagtccgctgggaagaaagcaggaaaagagccaaccgggatttcttagagattcataagaagaaaggggctatttatctaaattgtgataacgaggaagatcgtagaaaattagaaatatgcagcttgaagggaaaaagaatattaaatcccatcatcgactggacagaggaggacatctggtactttatccgtaagtatcaggtgccttattgctgtctgtatgaccaaggcttttgtaggattgggtgcatcggttgccctctggcaagcataagaagccgggaacgggaatttgagcgatatcccaagtaccgcgatgcttacatacgagcttttgaccgtatggtaaaggcgcgtaccgccagtggtaaatctaagggaaactggaaggatggtgagagtgtgttccgctggtggatgtatggaaatgaaaaaacagataaacaggttgcaggtcagatggagctaaaggattttatcgacatggcggcttagtcacttcactgggttcgtaaaaggcatcaatgagtggagtaaaacgtattgcacgtaagcacccaatacggccgtaatgtacgtataacgaaagaaggaggaccaaatgaaaaaacaatcgtgtaggaactgccacaatattgatctgaataaaaaagaggaaacagaaggaaggctgagtggacgctaccgttatggctgcaccgtacaaagaagcgggtttatatgcggctttattatcagcgatgagaaactggaagctttggtatgcccaaactggaaaggagggaagatggaggaggcagactatgaaaggctggcggacgaatttggggaaaggcttcaaactctgtatgaccggtggaatatgtggaaaataagggggtgcccggaggcggatgtgcctgacggagaatatttaaatcgacttcgcagtggaatagaagcaatgatgaggcagattgagaataccttcgttgaggcagattacccagaatgttattatgctccgcttcctcccgttatggatgtggattacatggcgaattgccagcaaattaaagaaaccgcaattcgtgcgcttgaagaataccgaaataataaggattatttatggttagcagaccatatccaacatttggataatgaggacaaagaaaacagtgaggcttaccgtctcttgtgtcatgtacaaagtttggaagaagcgatttgcgaagatgcctacttgcagatgaagagagtgagcttccaggaaagcctgtatgatgacatggctaactgtaaaaggcgtattttgaaaagaaagcgccggccatcaaataggaaatcgaaaaaaaatagcccgcagattgttggtcagttaagaatcggtgatttgaaggcttcataaggaggaaaagaatggaccatcttatgttagtaaaaaatctgttcaatgatatgtttgtgtttcttaatggtactcaaccgctgcctttagaatcgctggatgatgtctaccagggggaaccactatttctggcgctgattggaggtttggaccaggcacttttggttgattataatagcgcaatgcaggaaagctatggattctataagaagtattgcggcagagaacttactgaagaggaatgggaacaagtggtagaagaaatccagatgttcattgataaatggaacaatagctggtgtaagggaatgattttggcgttattggcgttgatggaacaggaagaggacgagcggaaaggagaaggaaagatggagcaggcagaaagttccggagatgaagagttggatagcatagataatgctgcataaagtcagtatagccggggaatggtgaattctccggctgaatttaaaggagtatgacaatgatagaaaaattatataaaaaggttaagaatattcaagattttaacgagacagccagtaagttgcgtcaaatgggactaaaggatgaacttaaaaatcttgccgggaaatataaggttcctgaagtggacttgaaagagttcctctctggaaagcggtatttcctgatagacggaggagagacgcagaaagattatatgtcagcccggagtaagctgttggatgaaatgtttaatctgaatgatcctcaatttacggatgttatcggcaactatctcataaggtgctgtgataaaagcgattttgctgacctggtgctccagaaacacaagacactgcagcggtgtgttgagtcaatcatgagtcgggcgtatgaaatggtaagcgatgaggtgaaaaaaagtggccgatatgcaaacatggctgttttggaagacacagtttttgaatgggtacgggattattatttaacggatgaccgcgaaaaggaggccgagagaagaacggaagcagaagaggctttccacaaacgattgtcggcgcagatgaatactccgaagggaaacaaaaacaaaaccgctaagaaacgcaacgcttccaagaaaaataaagcaggtggagcaaacagcaatgcatctgagaaggaaggaaaacattcttcagccaagacggaggcggctgaccagaataaagaccagattgagggccaggtttctctgtttgagaacggcctggctgaataaggaggaaatgaccatgttgattgcatttaagggctttgataaggatttaacttgtacaaaccacggtaatacataccaatatcgattaggcgtgtggaatgaggaggataaagcaaattgcggaataaatggaatgcattgtgctgaaaacccattggactgtttatcctactatccggactgggacagggcagtgtattacatggttgtcgctgatggtgatattgacgaggatgcatatgacagcaaaattagctgcacccggttgaggcttataaagaaactggacaaaggagaatttgtggctcatagcttaaaatatcttcttgatcatccatttagaaaaaataatcaccttgtgtgtctgaatcaaggcgtggcaaaaaacggtattgtgattgtcagaggagagaatcctgttgccaaaggcgcaataggagatgttctgggatttgcaaaggaagtgagaagccggtccgagattacagagataggaatacatgctgtggatggaaaagagattcttccagatacttggtatagcatcaatggaaaaataagaaaggcaggataagagtcatgaagaaaacaagactgaaaaagctgggacatctgtatgcaacagatgaaatgctttgtatggcagaacaggatataccggagaataaaaagattgggtggcaaagagttgagcctgtcttccagcgagaggtatatctgcagagtaaaatttgtgacggtattttgatggttgctatctatttggcgagggatttacggctgggaagtaaaaaaccattatatgaaattttcattgataagagtaaaagagagtatcttacttgggatacagtaaagggaaagtggcggaccgcgtgtgtggaggctcttgaatttccgcattattacagttattcatgtgcctacataacaccagaagaagacattagattggctgaatatctgggagttacccagaaaggtatgaaaggtatctaccagtaccagcagtccatcctggaggagcgtctggagaatagatataaaaaagagacatctctatgggaggcggcgatgaagttggtccccgatgttccaaaagattggcttcgctgggtaaacagacatggattgaatgagaattttatattttatgactattcaaaaaatgtgaaagaggggttttgtacctggtgcgagaaaatagtaccagtgaagaaagccagacataatacatatggtacctgtatatgctgcgggcatcgtatccagtataaagctaagggaaaagcagggaggctttgtacaaaagaagaacaggtttatttaccgcaaaagtacggtgatggtcttataatccggcagtttacagcacaacgattttatcagaaaggggagtataaaacaccaaaaataatgtgtaatgaaaccggaagagttatttatgataagaatctaacagacacacagtattactatggcaggtataaacaaagaggataccgctggattaaaggctatcccagttactcgtttttttatggatacaacgattataaactaaaccatgctggtgctgtgtataaacgtacagtaccagcactgtcccgccatatattaaacaggacaggtctgccgcagttgatatctaccggatacaaaataagtccgaatgattatcttagcggcctggctgaggccccgtatctggaacgctttatcaaggcaggactaaaacaccttacgctggatgcactcaagggtcggattgaggtgtcagaatcccatagtttggcaaagtcgctaggaatagacggaaaccgtttgggacggttgcggaataatgatgggggcgaattgtttcttatatggatgcggtatgaaaagaaaaaacgcaaaaatatcgtggattcagtaatttgctattttgaagaacaggatatccgaccggagaatataaaattcatccaggatagaatgagtgaattaagaatatgcaattatctgaaacgtcagtatgcattaactaaccgacctcccctggaacttctatctacctggcaggattatctcaatatgtcaaaacggctgaaacgtgatatcacattggaaatattctataagcccaaaaatctggttgaaagtcatgatgaagttctccagttgtgtgaagataaaaacataacgcttcaggcagttgatatcgcaaaagtatatccggacgtggatgcaatctgcgagtccatcaaagaaaagtatgagtatagagatcagaagtatgttcttcttattccaaatcggattgaggatattatacaggagggcagggcactcaggcattgtatacgattcagcgatgactattatgaacggatacagagaagggaaagctatattgcatttttgagaaaagcagatcagccagagaaggcattctatacattggagtttgaaccggacgggactgtccgtcaaaagcgtacaagcggtgaccgacaaaatgtagattttaatcaggctgtcagctttataaaaaaatggcagaaggcaatccagccacgattaacagaggaggattaccggctggccaaagtaagcgcaagtctccgtgtagaagaatttaaagaactgcggaagaaaaatgcgaaagtatggcatggtcatcttgcgggcatgcctttagctgatgttctggaagctgatttgatggaagtttctttgtgtatggaggatgcaggggtaacggaagcagacggtcagaatggcgaacttgtggccgcataaaatcaaggagggatacgacaaatgaaacagaagctttactatattaagaatgaaacagcggaaaaagcgatttataagaattttgagaatcagaggttttcagtgatagaaaaagacagcgaacctccaatggtactatcgtttttcgatgataaaaatgtgactgatgaatatgagtatgtttatattccacgcgagatgtctaaaaaagaggttgaaggtcgttttgaagtggagaagcaatgccctatgtgtggaaccgttacaagtatttatcttacagatgaggacatggataaatacagctggtacagcaactcgcgttttaatcgtaggggaagcggcctgccggctccgcatatccaaaacttatttccggaccggacagaagaagaacgggaattaatgatgtcagggtactgctattggtgccaggaattgatttttggagaggatgagtttcttctaatgacagaagcagaattttcgatggagccagaccacctcattgcatataaccgtgcagaccatgatggatatcagtggtggaataagtggtttccacaaaagggtacggatggaaaccagtacatggtgcaggaaatgaataaattctctgcgtatattttggaggaacagcttggcaagggcatttccgacattccgaaacttggagcgtattatggagcagagccatctgaagacaaggaatatcacttgtactgcgagggaacatattgtaattttcatgtgaagcttataaataggaagagaagctacaatgtgtacatatatgtttacgaaacagaagagtaaataaaaaataggcaggaagccgccgggacatatgatatctggcggcttccgtaccatttcttataagaagaggatatgggatgagagactatattaacagaaatatcaggatagatggaagattgattccctatccggtgtatacattttgggaatattttgagttgcatgatgggattgaagatgtggaagattttgtagattcaaatcctgcgatagaagaattagtgactcagattttagcgttaaaacagagttgttttcttttgcgtcatacaacacatagctgccaaagcttaagcgacagtttgttttccctaaaacttaaacttattaaagagctcaaagagaaatataattataattttgatgatgtatggatggaaaatctcataggcaggatttgataccataatgacattgttccgtagttattatacaaatatgaaaaaagatagttgcccatagtggcatgaaatggaggcttatatgaaatatgaagaatttattgcggcgctttgccagaaaatacgcgaagtaacaaaaggatggaatggaacgagtatagaatttaggacaacaccacagaacaatgggagaaccttggatttactggtggtgagcaagcaaggaaaaaaaatgaatggaacttacgaattgagtttccatacacaggaattatatgaagcacttgcatttgacaaaatggatttgaaacatattttgagaatagtggaaagtaaactgagacaggctggggaagttggaaaaatcagcccgctggaagtcgctgatgattatgagcagatacgaagtcacctgattattcgaccgattaattatgtaaaacatatggaaaagttaaaagacggtatgtacgatttaattggtgacattgctttgactgtctatattcatattggctttgttaatggagcctatgtaagcagtgctgtgagttccgagtacctggagatatggaataaaggaaaagaagaggtaataaaagaagcatttacgaatacatataatttatttccgccaattatgttgacaggtcttgaggcatattctgttatggataccgatatatttcaaaaggatgctggatatgatatggttggggttacaaatgaagtcatattcaatggagcagtttcaattttccttcctggagtagcaaaaaaattaagtgatatcttaggggaagatttatatattgtattccttaactatgattatgcagttattcatcctgtcagcattatacggccagaggagattcgcagtttaatagctagcgttaattctgatagtccggatgaagaaggatttttgtcggatatgatattcacatacagacgcgattctgataaaatggaagtagtgaaagaagtttatagttaggtaaagtacagtttacaagggactacacttgtacgtctgaaataacggcatttaccagccgtgaagaatggacaactctggagatgcagatcatgtaggcatagtagaatactgtgaaaacggtgtcgtacataccgtggaagggaataccagcgactcgtgcgcacgccggacctactcagtaggaagcagcagcggcttccgaatccataccaggaccaaaacggggagccgcctgcatttctaagctgtgtcaatgcgacctcgacaatttgagcatctacggccccctaatagacgaatatcttgctgaccaacgtgcgggaatacatatatccgcccacattggcctattcctctggcagaattcagagaaaaaatactatatgatgcagtaaaggacgtatattcctgacagatagagcttccttcgagccggcctcgtattcctgcgcagagaacaacaacggcgcaagagaatgaatgattagctatggtcgatgccaaaggacgctagtagtaatttgacaatttgtattacaggttatttgcattttcatagatttcctttctatccttatcggataacagcccttcagtgataaaggcaatcgcaaaaatgacgaacagatttagcccaaaccgtatcagtgtaaaggacacacccaaagaggatatttcaaaaaggagtaaaggaatgcggatactggcgcttgtgcataggaaaagcagcacgtttgaaatcccgcagccctttttcaacagtaccccggcaacaggcagcagcgcatatatgggaacggctgttatcgttccagacaatatggctacggcaacacctttcacaccggaattcgctcccataattcgtatcattttttcacgttcaacccatacgtccatcaggccaatacagatgaatacaggcgtaagtataaagaggaagttgataaagttctttccgctaaaggccaatgctgtttttccaatctccgggtcatagagccaaatgatgagattacaaagcaccattacaaataaaaaccaatacttttttatcgctgttttcatttgagcaacacccccaataggtaagctgtgataaaggaaaatacaaatgcaagcatattccgaagaacggctattttcttacccagatattttgtctctatcgggatcgtgatcagcccaaccgtagtgagcgtagaaacaaataccgccatttggattatgcccgcgccgcttttcagaagttccgaaacaatggggaaagcaatcataacgggtactaacgaaaacgcaccaacaagcgaagctaagagcatgccgataaaacccgtttcttcgcctatcatgcgtctgattgtctccggcgaaagcaccgcaagcgccaccccaacaaaaagcaggatagcaacaaattgcggcaggacgcctgtaaacatcttccacgccttttttaaggataatagtgtttttcttttgtctttcaaaaaagagaaaagcagtaaaagtgctgctaaaccatagaacgaataggtaaaaactgtgttcaactctgttcacgccctccctagattgctttttttaacggcgaaagtaccaacagcgcaacaccgccgcccaaaagggctgttagcagctgtggtatagagaacatattcgaaatcaccgctgcctgcggagccggtaatcttaaaaagaacggcacggctatttgcgcgattccaaggtataggaccaagaatttggcggctgccgcagctgccaaagcaatcattggtgcggtatatttatgcccccaacgcctgttgccaatgaagtgccaaatcagcatgagggtaatgtttcctgccacgataaaggggatcaggctccaaagagggcctattccaatcagcttcgccataacaggcgaaatgacagcaacgcaaagccctgacatcatgccgcaggtcataacggaaacaatcatcagcatattcacaacagacccagtaataatagtgctccctaatgctccggtagccgcctgcaatacgacaagtaaggcgataaaaactgctgtgcgggtaatccaaagcgttctttctttgatcataattttgaaatttcctttctcttctcttgtttttcagattttattatagtacaattttgacaaatcccttgttgcacacgcaacaaaaaacgaggttattgtgatgcgtgagtttatagaagatttaaagcagacaaatctatttttcgccattgaaccagaggaaattgatgggctccttcattgcctctgtgcaaagtatgtccggtacgccaaaggcgactatatcattgaggaagggaacaaggtatacgacttcggaattatactatcagggcatggacgcgcaataaagtgggatccctctgacagagtgattcttatttctcttctgaaaaagggaagcgagataggggttattttagcggcaagtttagaacacaaaagtcctgttactgtacaggcggaggatgatgtcctggtattgcaaatcccttttgaacgcgtattggcccggtgcgaaaaggcctgcccccggcatgacaggctattacgcaactatataagcattgttgccaaaaaggggcttgtactgcacgaacgtatagattgtctgctgcgtccgacaatacgggagaaaatattgacctacttacagtgtatagcccgcgaacaacaaaaaagaacatttacgattccaatgaatagaaactctatggcagaatacctcaacgtggagcgcagcgcactttcacgagagctgtcctacatgaagcgggacgggattattgattatcataaaaacacgtttagactgatttgagatgcatagaagcagaggttcttgtaagcactttgtaggaagttatgtgattgaggaagaggaattgttgcagacaatggaggagtggttttctaaaaagcgctgataccaatcaagttttcctgcggccgccacttgcaaagcaaaatctggaatgctataatagcgctaacagaataaataggggagcttgtgtgacaggctgagaggaaggtagaccttcgacccttgaacctgatgcggataatgccgccggaggaagtcgtggagattggtactttttcagggggcatcctatgcaggtgtctcctgtttttttgcgctttttgaaggaaaggatgtgagaacagcaaccgcggtatgcctgcggcgggttgagggggagcgccctgaaccttgtatgacagcgatgggaagccgtgttccggcgtgagaggaggccagtaagcctcgaccgaatctttccaaccggcagactctagcggtctgtcatcattaggggaaggcgccgctatacagggccgttttctctcattacaaaggagtatcatactatgtttgaacagatttttgaaagtgtccggcagaaatccccgctggttcactgtatcaccaactatgtcactgtcaacgattgcgcaaacatgctgctggcttgcggcggctcacctattatggcggatgatccgggggacgctgtggagattaccagtatctgcggcggactgaccatcaacatcggcacgctgaatcagcgcaccattccggccatgcttgccgccgggaagcgtgccaacgagctggggcaccccgtagtactggacccggtgggagccggggcttccacgctacggacggacacggccctccggctgctaaaggaagtgaagttcgcggtaattaggggcaacatctcggaaatcaagacccttgcctccggcagcggcaccaccaagggcgtggatgctgatgtggcggattgggtgactgaagacaatctggatggggcagtatccttcgtcaaggagcttgcaaggcgcattggggcggtgattgccgttaccggagcgattgacattgtggcggatgaggagcgggccttttgtatacgcaacggccgtccggagatgtcctccatcaccggaaccggctgccagctctctgctctgacttcggcctttgtcacagcaaacccggatcagtccctggaggccgctgcggccgccgtgtgcgccatgggtctgtgcggagaagtcgcctacaaacgtatgacagggctggacggtaacgcctcttaccggaactatattatcgacgccatgtaccgcctgaccccggcggaactggagaaaggagcaaactatgaaatgcgataagcggcatatgctgctctatgctgtcaccgaccggacctggagcggggagcagactctctatgagcaggtagaagcggcattgaaaggcggcgtaacttgtgtgcagctgcgggagaaagagctggacgaagcggcgtttcttcaggaggctaaggacatctgcgccctgtgccgccggtaccacataccctttattgtgaatgacaacgtggatattgccgtcgcatgcggggcggacggaatccatgtgggccaggaagatatggtggcgggggaggtccgccgccgggtgggggacgcgatgattctcggtgtctctgtccacacggttgatgaggcccgtcaggctgtccacgacggcgcggactacctgggtttgggagcggtgtttcccacaagcaccaaggctgacgcggaccagatgaccagcgagaccctgcgggatatttgcagcgcggtggatgtgcccatcgtagctatcggcggcatcaaccgggataaccttcttagcctggccggcagcggtgtggacggggcggccctggtatccgccatcttctcggcagaggatattgagaggaattgccaggagcttcgggcgctggcagagaggatggtaagggcatgaggatttgcggcgtgatttttgatgttgacggtacgctgttggattccatgtttatttgggatacgataggcgagacatatttgcgctccatcggatatgagccgcgggaggatttgaacgatacgtttaaaaatatgagcctgcaccaggcggcctgctattaccagacagagtatggtgtgacgctgagtattaaggagattatggatggggtcaacgccatgctggagcggtattaccgttttgaggttccgctgaaggcgggagtaaaggagctgctggcacagctccagcggagcaaagtcaagctgtgtatcgccactgccacagaccggtatctagtggaggaggccctggagcggtgtggggtgctgtcctgttttggggagatttttacctgcaacgaggtgggtcacggcaaggacgaaccggaaatttttgaagcagcgcttcgcttcctgggaacaaagaaggcagagacagttgtgtttgacgatgcgctctatgccgtcaaagcggcgaaagcggccgggtttccggtagcggcggtgtatgacagccatgaaaagaatcaggaggaaatctgtactctgtccgatctatacctgaaagatttgacgcaattggataaactcaggaacttccttccggtttagcggctgggagttttaagcggcaaattgggggcaccaccttttgccgctctataaaaataatgcaaaggagatatagcaatgagaacagcattatcaatcgctgggacagaccccagcggaggcgccgggattcaggccgatctgaaagcgatgaccatgaacggtgttttcgccatgagcgctcttacggcgctggtagcgcagaacaccaccggcgtaagagaaattgtagaaatgacacccgattttctcgggcagcagattgacgcggtattcgaggacattccgcctgacgcggtgaaaatcggtatggtagcctcctgcggactgattgagaaaatcgcagagcggctgtgcttctaccaggcaaggaacgtcgtggttgacccggtgatggtggcgaccagcggcgaccggctgatttctgaagaggcggtggacaatctgaaaacctgtctgctccctttggcggccgtgaccacgcccaacatcccggaggcggagatcctctccggcatggttatccacagaccggaggacattgaagccgctgcaaaacagatcagcaacgcttacggctgtgcagtcctgcttaaaggcgggcacaacatcaatgacgccaacgacttcctctatgcgggcggcgtggggacatggtttcatggaacgcgcatcaataacccaaacacgcacggaaccggctgcacgctttccagcgccattgcggccaatctggctaagggctttgacctgcccgcatctatccggcggtcgaaagcgtacctttccggcgcactgggggccatgctgaatttggggaagggccggggacctatgcagcacaatttcaatctgacaggtgaatacgcaaaggaggcagagtaatgaagataacagagcggcttttgtccgcaacaaaggatatttgggcgtcttataatgcgcatccttttgtgagggggatccaggacggcacgttagaccgggagaaattcaagtattacatcatacaggactatctctatctggaggagtatgctaaagtgtttgcgttgggcatcgccaaggccaaaagccctgaggtaatccagctgttttctaaatatgtgaccttactgacagaaggggagatggacattcaccgtggctatatgggcagattctcggtttcctgggaagaacttaaggccacaccccgggcgctggataatctctcctatacctcctatatgctcagggtggcatatgaagagggagaggccgaaattctggctgctatcctgtcttgtgcctacagctatgaggtaatcgccaaaaaaatcgtagagaaccgtccggcggcgctggagcatcctttctatggagattgggtcaagggttatgctgattcccactacagtgagacgaatgtattgctgctggaaacaacagaccggctgacctgtagctacaccgaggaccagatcaagcacctcacagatatcttcgtagcctgctcccgttacgagctggccttttgggaaatggcctggaacatgagcaaatagaggggattcaaggaattgttattataggtttttgctttttcatacacggaatcttgtagatgttctataaatgtgcttaaactgaacgcaacaacaaatcgaaatttgcgaggatatgaaaacggagtatagaaaactatacgtggatgaagcggaacaattttggagtttgatgaatcaattggattatgaaacaaagtatatgctatacgaaccgggcgaaaggacaaagaatcttcctagaattgagtctttaatacgagattccgtggaagggcaaggcttccttctcattgccgaaacagataataagcttataggatacatatcagcacaaaaaggcagattgaatcgtattgctctttctgcatgggaatcggaatgtcagttatcacgattttgattttggttattcaatatgcaaaaagtaagagatttctttgccagttaagatttgtttatgaatactaggggagataacgatacagcgcctcgttggcgtttagataagcagataggagcaaagatattttagggaggaggaccaatatgaagattgtaccgaccttgaacttcggcggtaactgctgagaggcaatccaaatgtatgaaaaggcatttaggggacagataatctgcctgattacctatggcgaggctgatgatccgcaatacaatccactgctcagggataatcagaaaaattatatttatcatgcggaacttctgattggtgaacagaaaattatcatgagtgaccatgtggacattgagttccagatctgttactcgaattttcttaccatgatgtatgatgtgaaagaggaggttcagcgggcatacgagattatgagagaagggagcaagaccatttatactatggagactactccatacagttcctgcagagtgttttttgttgacagattcggcatccgctgggggattatggcggagcagacggagaggtgaggcgttgaattgaaatggtaagatatattgcatttttgcgtggcattaatataagcggaaaaaataaagtcccgatggcagaattaaagaaaggctttgaagaaatagggtttgcggaagtaaaaacttatctgaacagcgggaatgtgatattttcaagtgacgaagatgatatggtggaaattacaaaccggattgaaacgatgataaaaaggcagtttggccttgagatccccgtttttgtcatatcaaaagagacacttgaggatattttaactcatgcaccggattggtgggggagcgaagataaggaaatctatgataatctgattttcattatccctcccgccacatttgctgatgttttcaacgaaattggggaaccaaaggaagaattggaaaagataaaagactacaaagaggcagtattttggtcttttagccggaaggattaccaaaaaacaaattggtggtcaaagactgcaagtactaaaataagtaccaagctgacaatcagaaccgcaaatactgttcgtaagatcgttggaatgtagctgccagactgaattaaaaaacgaaaggaaggacaaatcaatgaaaatcgaaaaatgcaaaaaagactcctttattgtaattggaaaagagggggcaacaacagacggggctgatttcatccaaaagctatgggacgatgcaaattcccattttggagaagttcagcatttggcaaagaaagatgaaaacggaaatattagtggaatatggggcgcgatgtctgatttctcccgttccttccagccttgggaagagttcaatcaaggactatatcttgcaggagtagaatgcaatgatgatgccgaggcccccgacggctggacaaaatgggtgattccaggctatgagtatatttatgtggaacgtgaaaacgatgctatttttccagaagtaatacaatatctgaaagataataatattgccctagttggggcagttcatgattttacatgccctcataccgggaaaggatatatgtttttcccgataaggaagttgtaaaaagaatttacggaggaaaacaaaaatgaaaagaccaatactgaattgcttgaaaaaatattagtgaacaattttggcagttcagagttttttataaataaggcaatcggctggagcctgcgagattattctaggattaatcctgattgggtaagggaatttgtggaagagcataaagatagaatggataaattgagtattagagaagcaagtaaatatttatgacttttagatggtatctgaatacagcagttatggagctgatacggaaataatggtattcaaatggtggaatttagcggagaagaaatagatattttcgaggaaaaagcatgataggcatatatttaagtggaacaggaaataccaagcactgtattgaaaaattgatggggttattggatgaatcggcacgagctatcccgattgagggaaaagaaacagtaaatttgttggaacaacatgactttattgttttggcatatcctgtgcaattttcaaatgcacctgtcatggtaagaaattttataaaagaccattcagacctttggaaagggaagatggtgctttgcgttgctacaatgggactatttagcggagatggggcgggctgttccgcacgattattgaaaaagtatggtgcaaaaatcgttggcggcttacacattcatatgcccgattccgtttgtgatgtgaagttgctaaagaagtctattgaaaaaaatcgggagatcattaaagcagcggacaaaaaaattgaaaattgtgcgggcaaaatgaagcaaggcaaatacccaaaagacggattgtatttttacgataggatagctggactactctgccagcggttatggtgttatggaaaaacaaaagactattccgataagctgaaaatcagcaacgcatgtacggggtgtgttctatgcgtccgtatatgtcctatggaaaatctcgtcataaaaaacagcaaggcgactgccggaagtcgttgtactatgtgctaccgttgcattagttcctgtccccaacaggcaattacactattaggaaatacagtagttgaacaatgccgctatgaaagatatgtggaaaggtagatatcttctattcttataaaaatcaggataggtagggaagttgcagagaacgaaaaatcggaattgatggaggaattgacaatgaacaggtatgaagaaggaatgaaattaatcgaagaaagttgtggcaacaagaaagataatgccattgcactctcaacgattgctacggaaccgagtgcagatggttttcctcgccctagtgtccgtgatgtaagcgcttattatgaagatggagtgttttatgtcacaacgtcagcaaaatcaaacaaaatgcggcagatagctcataacaaagaggttgcgttttcagtttgctttgaggggatatacggacatggaattggagaaaacctcggatgggttttggatccccaaaacgctgctctaagaacgaaactccgtgaagtatttgcagactggtacgatgatgcaaataatgagcaggatgaaaactgcgttattttggcaatccgtatcacaagtgcaacgatatttagagaccacggtgctttgcgttataatttggactttgcaaataaggtagcggttgaataactgtcaattaagtaaggcgttaagcgctatctaatgagcactctattgggagaaggcgcacttacaattcaagtttgtcgaaacgcaaaacgggaggcacgctctccttttacaatgcgcaggtgtgaagttgctaaagaaatcccttgataaaaaatcggaagaagtagcagacagaaaaatgaaaattgtgtgggcaaaatgaagcaaggcaaatactcaaaagttggaggtactgcaaaatgaaaatacaaagagctctgggtttgctctttttgggcatggctcttatcctgactgcctgtaaagtggaaaacaccgctgacacaacaacagaattagcccaaaacaaaaacagcacaacttcaggcgtggacacaacagcaacagaaatcacacctgatgaagaaggctctgttgttagaggtacacctgatgataacggtcttggacagcttgaatattgggacatagacgaatttgaaatctggatggaacaacaacatgaaagaaaccagcgtcttgcggataaccatgagaagtcgttttacgacaaaggcgcaaatggaggttattatggcatatgctgatgaaaaaatgcttatgaacggaaaaagcatacaatttattttctttggcggtcaagatgcattgatgaatgctgcgcggcagttgggatatggacagaaatcagagcactgggaaatgcaatatgattttgcatatgcattggattatccactgccagaaggttttcaatttataaaaccgcaggatctggatatatcaaaagtaggaaaatgctgctggaaagggtttgaccatgagcaaagtgaaggcccatggaaccatcagtatgagcaacataactgtttgctgagcatcgcgccgcacgcaacgccggagctggatgtggctattgctattgcggatgagtccggggaatatgtctgctatgcaggaatgtggtggactcctgaaaatcatctggcatatatggaaccgctctgcaccattcccgaatatcgacataaaggtctcgccgaagcggcattgtctgaaatgtatcggagaacaaaggcgttaggggcaacgcatatgacaggcggtgcaaacagattttatcagaagcttggataccagaatgcagtaaaatggaccttctggcaaaaacaataaaagtatgggggacatccagtgaaaagctcaacagtgacagcacagttttcctgcgactgtaaaacggcctgggacattgttacagataatgagaattttgaatggcggagtgacttgtccaaaatcgaaatcattgataaaagttggtttgacgagtatacaagggatggatttgtaacacattttcggattaccgcaaaagagccataccgagaataccgctttgatatggaaaatcaaaacatgagaggtcactggagcggcatatttgagagctgtgatgggggtacgcagattacttttacagaagaggttcaggtgaggaagcggattatgaatctgtttgtaaaggggtatctgaagagacagcaggccagatatattgcagatctcagaaaagcgttagcaaaattgtaagattgttggctggttatagataaaacagtttacagaaaaatactgataatttaattaggagaactcaaggtggcaataatataacgagagaacaaaatgagaaatccagaacaaacaataggaaatttaattgataagcagaatgtttcttttagtgcttctatttctaaacacgatggcggaaacgttcaaatcatatgggcgcagtccccggcaatggttagaatacagattaaggataacggaagcgggattttgccggaagatatccatcatatctttaagaggttttatcgcagtaaaaaatcgttggatacacaaggcgtaggattgggacttccccttgcaaaagcgattgtagagggccagaaaggtgtaatttcagtaaaaagtgaactgggtgagggaacaacctttacaatttccttccttacagactcgtaagcggaaattcatcggaatgtaaggtgcctctgttatactctataattacaggaggtactgatatcatggaaatactaaaggtacaaaatttatgtaagacctatggcaagggtgaagcccgggtagacgcattaaaaaatgtttcttttgctttggaaaaaggagaatttgcagcagttgttggtgaatccggttccggaaaaagtacattgctcaactgcattggcgcgttggatgctcctagttctggcagcgtgacgattgaaggacaaaatctgcatactatgaaagaggaagagcggactattttccgccgtaggaatatcggctttatcttccagtcttttcagcttgtttcggaactgacggtagaacagaatattattttccctattctgctggattatcgcaagcctaatgcgcaggatgcaaaggaaattctggatatgctgggtctgacagaacgccgcagccatttgcctaaccagctttccggcggacagcagcagagggtagctattggccgtgccttgattacaaggccaaagctaatcctggcggacgagccgacgggaaatctggacagcaaaaacagtcaggatgtgatggatttgctgacacaggcatcccgccactatcagcagacaatcttaatgattacccatagtctgctttaccagttctacactttcatgcaaaacatgagctgtaccaataagtataatttctttatcttcgtatctgattgttgttatattatctgccattacacttccccattaagctattcttataccgacaaaaaggtaaagtaccaaaaggaaaataacaacagtcaagaaagtaaagaaagctcctttcaaaactgatttaatcattcctttcttccaacgtttagataatttctgaaccgcttcggcttctgctaagttttcaaccctgctactgatagacaattcgctatccatagcccgtaattcatcacggcagctttcacaatgtttaagatgttcttcaaccgcgtttttgctatcttcgctgcaaacgccgtcatgatatagcggcagcaaatctttgataatgtcacaagaaatattcatttcatttcctcctgtaattgttttttggctctgtaaaaaaccaatctcgcccaactatctgttttcccgaataattcccctatttgagaaaatggtaaatcaccgaaaaccctcaacgtaaaaacttctttatacggttcatcaagattatgcagtaaaaaatgtagccgtcttgccgtatctttgtcaatgtatgatttttctaagtctaaagctgaatccgggtattccgtatctacctgtggggaaaatcgcttttctttcttacaataagaaaagtaagtgtttttagcaatttgacaaagccacacatataatttgcagttaccgttaaacttgtctatgtggcgcattgccttaaaaaatgtctcctgcgtaatttcttccgcaactgtttcgctttgagatagcgttaaaatgtatctgtaaacttcggaaaaatattccgcatatactttttcaaaatcgggcgtctgcactgtctcacctcctgttcatttataagacttctgagtatctaatccgtttcaaaagtttttgcctttttttttcgtgcgtcggtaggtttctttgcgtcttttggtatcagccacatatacccaatttttgaaacacccggtatgcgattttcttcacatagtttctgaacccgtctttctgaaattttccattttatcgctgcttccgggcatgacatatattccataaatctattccgtcctttctttgcactttagcaacattatatacggctaaacgaataaaatcaacaaacaagaaacaaataatatgctttattgctatcaatactatgatatgtgtactcatatccaacgggaaaggtgaacggtaaaatgtaatagagtgaaaaatatgaagcaggacaaagtgaagtatgattttaaggctttcgggcaagccataaaagaagcaagaaaggcaaagggtatctcacgcaaccagttagcggacaggctcaacattgcgccgcgctatatcgcgtccattgagaacagcgggcagcacccaagcctacaaatcttttatgagcttgtcacttttttgatgtgtcggtagaccagttctttttcccgaatgaggaaacggacaagtccacgcaacggcggcagctcgacagtctgcttgccgatatgagcagccgggatttaacgattatgacagcaacagcaaagggaatacaggaagcgaacagcaaagaaacgggggaataaaatcctccgttctttttgtctgtgctgctattggaaacgtcgcaagctgcggttttttttcttttttccggggattgttggcatttccccgtctttgacgtggaagtatgcgaaaagaagaatagcaagcataggaagtgtagccacactcccgtattttgcccgcccgcgccctgcggcttgtcggcaaaatgcttgttgggaagtgtcccaaaccctcggaatggaaaggagcgatacaatggcaaacaggacaagaccgcttatcctgcgtgtcccggtcaatgaacaggaacgggaattgatagagcagaaaatgaagctgatacccacgaaaaactttgcggcatacgcccggaaaatgctgattgacgggtatatcattcagatagaccatagcgacattaaggctatgacagcagagatacagaaaatcggggtcaacgtcaaccagatagcgcggcgggcgaacgccacgggcaacgtctaccaagaggacatagacgagattaagggggtgctgaatgagatatggcggttacaaagattaagcctattaaaagcactctaagtaaagcccttgactatatccagaacccggaaaagacggacggcaaaatgcttgtgtcctcgttcggttgctcctgtgaaacggcagacattgagtttgaatataccttgtcgcaagcgttggataagggcagcaatttagcccaccaccttatacagtcctttgagccgggggaaacaacgccggaacaagcccatgaaatcgggcggcagcttgccgacgctgtaaccaaagggcagcatgagtatgttttgacgacgcacatagacaaggggcatatccataaccacatcattttctgtgctgctaacttcgtagatcaccacaagtacgtttccaacagacggacatattacggcatacggaacatgagcgacaagctgtgccgggaacatggcttgtccatcgtcgttccgggcaaaggcagcaaggggaaaagctatgtagagtaccaagctgaaaaaacggggacgagttggaaaggcaagctaaagattgccgttgacgcgctcattccccaagtggcagattttgaggaattattgcggcggttggaagcgtcaggctatgaaatcaagcggggcaaatacatatcctgccgcgctcccggacaggaacggtttacccgtttgaaaaccctcggcgcggactatacagaggaagctatcaccgaacggataagcggcaagcgcatacgcgccgccaaagctccacgggcagagaaaaagggcgtgtccctgctgatagatattgaaaacagtatcaaggcgggagagagccggggctatgagcaatgggcgaaaatccacaatctgaaacaggcggcaaagacgctcaacttccttacggaacatcagaatgaacagtattcggatttaatcagccggattgaggaagtcacggcggcaagtgaacaggcttccgacgcactaaagagcatggaaaagcggcttgcggatatggcgttgctgattaagaatatcacgacgtaccaaaagacaaagcccatttatgacgcataccggaaggtaaagaacagcgggcagtaccgcgccgcccatgagggcagtatcattttgcatgaagcagcagcaaagacattgaaatcggcgggcttatccggcaagctccccaacgtcgccaccctgcaaacagaatatgaacggctacaagcagaaaaagaaacgctgtactctgactatgggaagctgaaaaagcaagtcaaagaatacagcgttatcaagcaaaatattgacagtatcttgcggcagggcaaagagccggaacgggataaggaaacgccgcatttatagtgttatacaaaggggtctatcccggcttccgtgtaagttgccaaatacgttgtcaattcttcgggggtcggggcttctcctttgcaaggtatctttttccaattcgcctgtacctgtgggtcaggattgcataacccggaaatcatggcaagtttcatctgcgaacgtatgtattcaacggtttttccctctttcatggcaagcgtccgtattgcacgttctgcgtcgattttctttttcattcgtaaatctccctatcataaagtttattgattgacatttagtgaatgtcaatacaggaacgattttaacatatactttcctatatgacaattagtaaatgtcaaattaggagagctgatatgtataaaaacaaagcgggcgacggctcgaacaatatttgtgggcgcaaaatcaagaagtttcgggaatgtatatcctccaaaccgtcacaaaaagagttttcggatatgctgcaaattgcagggcttgacgtggataagaacgctatacagaggattgaaagcggtaaaagatttgtaaccgatattgagctaaaggcaatcgcaaaggtgctgaatgtaagctactgtgatttgttggacgattaacccaaaaagaaccgggcgcggtagccaatcactggccaccgtgcccggtctttttgtgggtgttgtttcctgcgtcctgtcacgcgatagaacgccgattttgagggaaaaggtatcaatcccttgccgcttgattttcaagcccggaaagccccatgatacaaggcttcctttgcccctactgcgtgacatgagggcataaaaaaagcggcgttcctgttttcccgtgtgggaataggtaacgccgcctgtctggtggtgtgttgtgtttctctatttgattgctgatgtgccacgccatttccaaacggcggtatggggtctatcttcaaaaggatttcggcggcatatcaaagctaactccgtaagtagtaaattggtagtaaaatcagcctacaatcctttgaaaacgcccgtaaatcaagggctttccgagataatcattgaatttttgttaaaatttctaaataatcccattctaatcctatttatattatataaggtttattttttgtacattgaaaatagcataggttcagttgtcctataacaaaaactgaaatcgagcatacgagagatacgccatagcagaaatgctgcgaaatatatcaaatcaaaataagcccgggcaggggtttgatggcttgtgacggccgcataagctgtgcgaggatgatatcagttggaaacttgtggggactgccgctcacctaatgaggggaggctgcgttagtatggaaacatctggcgtggtttaagctgttttgcaaacagataggacaactccagatgccgggggacgagtaaatacggcatgaaaatttgctttggagaaagcacaaccaccttaatgaaatgttataagaagtaaaaaaattgtgaaatgctcttgaggaaacaaaagccaattttttacaatgattgtagagaaacagactgttttaaaaactgagcggttttgtgaaatcaatatagtattagcgattagtctaagattgaaccacgttaggtggcatcaatcatgctcatggctagttgcctttgtaaagggggtgacagcgatagaagttttacagaaagataaaaaagtatataacgcagaggaaatccaggagattttagggattgggaggagcaaaacatatacctttttggacgaggcgtataggaatcaaaagccgttccgggtccttaaagttggaaagcttttcagggttcccaaacaatcttttgatgactggctagacggaattagttaaggcgggtgagatagttgaaaagaaaaccacagaatagtgcagctttttttgaaaataattcatggtatcaccgtaccaagatacttcaggacgatggttcgataaagtacagcaaaaagggcgggtttgctaccagtgaagaggctgataagagctataggcgacacgaagatgagtttaaaaaggcgtatcgggcctatcatctggcacatcaaatcaatacagaagtcacgcttaaggattatttgatttattggtttgaggagatattctctcaaagaattgaaacaacaaccagaatggtaggcgcatatgcggtttatgacttaatcctgccgaatattgagtacgacatcaaggtccggtttgccaatgcagagtatcttgatgcattgttggagcgggtagcaaaggtcagtgcctctgcaggaaataaagggcgggagattctaaatatggcaatgaaagaggcagtaatcggtgggtatattaaaaccaatccggttactggcacaaagccgtataagagacaaaagccaaagataacaattctgagtaaagaaaaaatcaaggtcctgctgaaagcgtcttccgaaaataactggtatttggaaatattgttagggctattctgtggcttacgaaaaggcgagattcttggacttaaattcagtgatttggatatggagaaaaggactgtaactatcagaaggcagattgcttcagatccacttataaaaaaagggagtggaagtaaaatagacaattatgggctgattgaacgagatccaaaaacaccaaacagtttccgggttttgcgggttccagccataatcatagaagaactggaaaaacggagacgacttgtggagtccaataaggtagtgtatgccggtcaatatgatgacaatgattatatcagctgtcagagaaatggaaaactacatagtttgtcagctttaaatagcgctttaactggaatttgtagcaagaatggccttccgcatatcacggtacatggattaaggcatatgtatgcaacaattctgattgagatgggggttccactgattaagatatctgcattacttgggcacggctctgtccacacaacgtttgaatattattgtgatgtaatggatgaaaacgagaatatattggcatttatgaatcaagcattcgttcctgtggaaaggagagcagtatgataattgatttgagccttcagcagtatgtggattgggaagtaaagccagtgattcctataaagggaaaattcggataccgtgttgttttaaaatacatagatggtactgaaagaactcagcaaaagtcgggatttaagacagataaagaggctaatgctgccagggataacacaataggtaaattacatgctggaacttatattgtatatgagaatgttaaagtaagtgactttttagagttttggctaaaggaggatatatgcaagagggtaagaagcgaagaaacttatgctgcttattccaatatcgtgtataaccacattattccaatccttggaaagaaaaagatgtcagccgttaaccgtggagatgttcaaaagctgtataacgaccgtgcagaatattctgtatcggtctcaaggctggttaaaacggtgatgaatgtctctatgaactatgctgtagcgaaaaaaatcattgcggagaatccggcagttggtatcaatcttcctaaaacggtaaagaagaaggaataccatgcccgcagtattgacacacagaaaaccctgacaatggatcagattctgattctattggaggccagcagggacacgccgatacatatgcagatcctgtttaatgtattaatgggacttcgcagaagggaaatcaacggtgtgaaatattcggatattgactatattaaccgaacactaaagcttcgccggcagttggggaagaaaatcaacacaaaaaaagaagactttccacctaaaacctttacgaaacaggaacttggattgaagaccccatcgagctatcgtgatattccgataccagattatgtgtttgaggcgattctgcaacagagggaggtgtatgagagaaataagagtcgcaggagaagccagtttcaggattcaggatatgtttgctgctctaactacgggaaaccgcgaagcaaggatttccattggaaatattataaaaaactattagcggataacaacctgccggatataaagtggcatcatttacgcagtaccttctgcacactgcttttgaaaaataattttaatcccaaagcagtatccaaattaatgggacatgcaacggagctaatcactttagatgtatatggtgataaccgggaaattattgctgactgtgtagatgaaattcagccgttcatagatgaggtgcttccgataaaggaggtagacaagcagtttgaggaagaactgttggaaatcgaagttccggcagaagattatgtttaaaaattaagggcagtagtagtttcaatcaaatatcaatttggttctcaaaatgaaacaaggcgcaggggaaagaacaaatgttcctacttgcgcctatactttttccttccgctatgttataattttggtgacatttggtattactaatttcattgagtttatatagtgttgcggagttaagaaaatagcattttggtgaccttcattcgtaaaatggcaaaagttcgtctattaggcaactcaaaacggtcttcttttacgaatttctgcctaataggcgaactttttaagtggtcaccaaggaaggaaaaagcgaaaatggagttcaaattacactcagaataccagcccaccggcgaccagccgcaggcgattgaagcccttgtaaaaggcttccaggaaggcaaccaattccagactttactaggggttacgggctctggaaagaccttcaccatggcaaatgtcatccagcgaatccagaagcctaccctcatcattgcccacaacaaaacccttgccgcacagctctacagcgagtttaaggaatatttcccggagaatgcggtcgagtattttgtctcctattacgattactaccagccggaagcctatgtcccctcaacggacacttacattgaaaaggattcagccatcaatgatgagatcgacaagctgcgtcactccgctacggctgcactttccgagcgggaggatgtgatcatcgttgcttccgtgtcctgtatttacggcctgggcagccccatcgactataaggagatggtgatttccctgcgtccgggtatggaaaaagacagggacgaggtgattcacaagcttatcgacatccagtatacacggaatgatatggattttaagcgaggcagtttccgggtaagaggcgatgtgctggagatttatccggcatactcaggcggagatgcttaccgggtggagttcttcggggatgaggtggaacggattacagagattgattcccttaccggtgaaggaaaggcggaactgggacacattgcgatcttcccggcatcccactacgtggtttcaaaagaaaagatggagcttgcgactcagacgattcttgcggagctgaaggagcaggtggcttattttaagagcgaggacaaactgctggaggcccagagaatctcggagcggacgaattttgatgtggaaatgatgcgggagacagggttctgctccggaattgagaactattccagacatttgaccgggtccctgcctggagagccgccatgtacgctgattgattacttccccgatgattttctgatcattgtggacgagtcccatataacgctgcctcaggttcgcggaatgtttgcgggagaccggtccaggaagacgactctggtaaactatggattccggcttccctccgctctggacaacaggccgctgaattttgaagaatttgagtcgaagatcgaccagatgatgtttgtgtcggctacgccttccgtgtacgaggcaaaccatgagatgctgagggtagaacagattatccgtcctacaggacttttggatcccgagattgaggtgcggccggtggaaggccagatcgatgatctcgtttcggaggtcaacaaggaggttgccaataagcataagattcttattacaactctgacgaaacgtatggcggaggacttgacagattacatgagagagattggtatccgggtgaagtatcttcactctgatattgatacgctggaacgctcggagattatccgtgatatgcgtcttgacgtcttcgatgttctggtcggaatcaacctgctgcgggaggggctcgatataccggagattacgctggtggcgattctcgacgcggataaagagggattcctccgctcggagacgtctctgattcagacggtgggacgtgcggcgcgtaactcagagggtcacgttattatgtacgcggactccatcacggattccatgcgtgtggcgattgaggagacgaaccgaaggcgcgcgattcagcagcagtataatgaagagcacggaatcacgccgacgaccatcaagaagtctgtccgcgatttgattgccatatcgaaggcagcgatcgaggacaagaagtcctttgagaaggatccggaatccatggatgcgaaggaactggaaaaactggcaaaggaattgacgaagaagatgcatcaggcggctgcggagctgaacttcgaggaggcggcaaggctgcgtgaccgtatggtggaagtgaaaaagatgctccaggaactggacgagtaaataaaacagtaaaacaatgcgcaaatcatagaaagtcagcattatttgatattgacaataattctcaataagtgtagaatttctatggacgccggaatacagaaggtgcccgggccgacgatcgtgaggcctgggttttccattgccctgaaacagggggagacgaatgaaacggcagtccggaggagaacagaatgaaactgcacgaaggcgaaataggtaagacatatattgtctacagcgtaatggtggacgacacgattacgaggcggctggaagccctcggcgtcaacgagatgacgccggtaaccctgatgaataaaaaaggcagcgggaccgtgattataaaagtaaggggaacccgtctggcgttagggcgcagaatatcagagggaattgagatcagggaggccgcagaccatgagtgatgagaataaagtaattaatgtagggtttgttggtaatccgaactgtggtaagacgacactgtttaacgcctttacaggagcaaaactgaaagtggcaaactggccgggcgttacggtggagcgggtggaaggagagaccagctataagggccggccgatccgtgtcatcgacacaccgggaatctacagccttacctcctataccattgaggagaaggtcacaaggaagtgtattgaggatggagaagtcgacgtcatcatcaatgtggtggatgcctcctcgctggagcggaatctctacctgacgcttcagctgctggaactgaagaaaccggtaattctggcattgaatatgatggatatcgtggaggaccgcggtatggagatcgatcttcaccgtcttccggagatgctcggctccattccggtagtaccggtatcggcaagaaagcggaccggtctggatgtgctgatgcatgcggtggtccatcactacgaggaaggtccacagggcacggtggtcaaatatacgccccggattgaaaacaagatatccaaggtggagacggtacttaaggctcactacggagacatggataatttgcggtggcatgccatcaagtttatggaatacgatgagaccgtctggaatgaccatccggtggacttaaataacatcattgaccataactatgagaaggagatcatcaatcagaaatacgattacatagaggagattataaaggagtgtctggttaacaaggagtccaaggcggcatcgaccgataagattgatgaatacctgactcatccggtctggggaatccctatcttcctggggatcatggcaatggtcttctttctgacctttacggtcggtgatttcctgaagggatattttgaagtcggactcgactggctctcaggcagtacgctgtatcttcttcagagcattcatgcatcggagtggattacctccctggttgtagatggaattgtggccggtgttggcggaatcctgacattccttcccaatatctttatcctgtttcttgcgctggcatttctggaggacagcggctatatggccagagttgcctacgtgatgaatgagaccatgggacgggttggactttccggcaaggcgtttctgcccatgctgctgggatttggctgtacggtgcctgccgttatggcggccagagctctgccgagtgaaaaggacagaagaaggactattttgatcacaccgtttatgtcgtgttccgccagactgcctatctatgtgctgtttgcggagatgtttttcccgcagcacgcactgattgtggcctattccctgtatttaatcggactggttgtcgccattgcggtggctcatgtgacacaccggatgtcgaaggctggggaagaggatacactgctgattgagctgcccgagtataagacgcccaatatgcgcacggtggcaatctatgtatgggataaggtgaaggattatttaagcaaggcgggaaccaccatattcctggcttccatcgtcctgtggtttgtgttaaacagcgggccctccggctttgtagatgacgtttcaggaagctttgcagccatgatcggcagggtgttagtaccggtgctgaatcctgcggggcttggggactggagaattgcggtagcgctgatttccggtctgtcggctaaggaggttgtggtatccagcttctccgttctgtttggaattggaaatatcaattcggccggcggtatgaatcagctgtccggcatcctgtcgtcgattggctttaacggtgtcaatgcgtatgcgctgatgattttctgtctgctgtattctccgtgcatcgctgcggtggcaaccatacgaaaggagaccggttccacaaggtggacactggggatggttctgtttcagcttctgactgcctggggagccgcggtgctggtgttccagatcggcagcttactcttttgattcatctgatatcagtttagaacgcccgaacgaatttgccgtttgggcgtttttatatatggagattctctttttagacatatttctgtttttgtctaaaaaccatccaacttaaataaattgtataattacaaaaaggggaaaaggtattattgttaagatcgtaaagattggaaaagggtgatggctgtgaaaacgagaaaaacaagagagaaaagacagaaaaagcgttttagtatggtcgatgtgattgtacagaaaggcagatggatcgagaagatttttgccgttgcggtgattctttcggtgatatctgcctgttttgtgcatgtaaattacgatttgagcgaatatctgcctgactgggcgcctgccaaggaaggcttaaaccggatggaggaggaattcggttatccgggaaccgcccgggtgatggtggggccggtgacgctgtatgaggcaaaggcctataaggaccggatcgcggagattgacggcgtggatatggtcatgtgggcagatacaaccacggatgtatacaatgccaacatttttatcaattacgatgatatccaggattattataaagatgattacgcggtgatggatatcatattcgaggaaggcgattccagcagtctgacgaaatctgccatcaatgagatgcagacccttaccggtgacaaaggctatttcatgggttccgcggtacagaataaatccttaaatgagacgctgatgcgggagatcagcattgcaatggcactgggagtggtgatgattgctgtcattctgtgcctcactaccacatcgtggtttgaaccggtcatgtttttgatggtcatggggattgccattatcatcaatatggggaccaacctgattctggggaccatttcatttctgaccttcagcgtggcctcgattctgcagctggctgtagccatggattactcggtattcctgctggatatgtttacaaaggaacgggcgaagggaaatgaccccgttaccgctgttaccaatgccatacataaatctctgccctctattctggccagcggcgcaactacgattatcggatttattgttctgatgctgatgcgtttcagcataggaaaggatctgggattcgttctggccaagggaatcgtggtcagtctgattaccgtgctgtttttgatgccgtcccttctgcttcgatggggagacaggattaagcggacggagcataaatcctttatgccgtccttccatggcctgggccagacagtctataaggtccggtatgtggttttaggcgtggtgcttttatttgtgattcctgcatttacggcgcagaatatgaattcttttacatttggaaacagcgcgctgggatccagccccggaacgaaggtgtatgaagatgagcagcagatcaacgggcgtttcggaaagagcaatctgattctggccgtggtacccaataccagcatggtgaaggagaaggatttaacggatgcactggacgatttatactacgtaaaatcagtcacctccctggcgggcaccataccggagggaataccggaaaaaatcattccaaagagcgcaacgagcctgctgcatacggaaaattacagcagaattatgatctatgtgaagacctcggatgagagcgattttgcgtttcagtgcgccaatgagattacctccattgtaaaaagctattatccggaggattcctatataacgggagtgatcccttctacacaggatatcaaatcgattattacggcagactacagtttcgtcaatctgctgtcaatcctcggcgtggggctggtggtgctgatatcgtttaaatcgctgattattccggttgtcgtcctgatccctatcgaggtggcagtcttcttcaatatggctgtcccgtatttcactggtgaaagcatgctgtatatgggatacattatcgtcagctgcctgcagctgggagctacggtggattactccatactgatgacgaataattacatggatgcgagaagaacgtatccggaaaaggcacgggcgattaagcataccgtatcgcggagcgccctttccatattgacgtcgggaacgattttaacgattgcagggtatggcttatactttgtctcctctgtggcggcaatcggcggtcttggtcatctgatcgggcgaggggctttaatcagtgttctgatggtgctgtttctgctgccggtgcttcttaccatggcggatccgctgctcatgaaggaagaggcaaagaaagtcaggctggaggaagcgcgtcttgcggcgaggcagaaaaaacgggatttgaaggaacagatgaaacagaaaatggagcagatgaaaacggaaccgcaaaaggaaccgccgtcaaagaatcttgagaatgaggtgaaggaacatgagaaatagaagaaaaatcagatacaggattaccgccgccgccctgatcagttcgatactcggcatgtccatggcggggagcgtccttgccggaccgcccgcggtggctgcggatgaggctctgtatgtgaatctcgatcattatggaaaccgggtggacagcagtgtggtaaagggaatttccttaaacggccttcggacatttacggattacgggaattacaaagatgtcaccaatatgtccaattacgcggaacctgtgataaacggggactctgtcacctggcagcttccggagaattccaaggagcggttttactacgagtgccagttggacaacgatgaggtggttcttccatgggattttgacgtttcctataagctgaacggcattccaaaggaagcaaaggatctggttcatgccaacgggcttgtggaaatggaggtccactgcattccgaataagaacgcgagggagtattaccggaataatatgctgcttcaggtggcaaccatggttaacatggaagatgtcaatgccgtggaggcacccggctcccagacacaggcgctgggaacgtataaagtggtaatttttgccgcagtgccgggagaggagaagacctttcacatcggtatcagcacgacggatttcgagtccatgggtctgattatgatgatgattcccggaacgctggaccagatgagtgagatcaccgatatcaaagaggtaaaggacacggtgggtgattccaccgacaagctgctggatggtatgaatgaaattctggatacactggaccggatcagcggcggcatgaatgtggcacaggcgggcctggaggatttgcagaaggcgagagccgggtttgatgcgtcaaaggacgaaatcaccgccaacgcggataacagcctggacagcttagaggctgtcaatgaaaagatcagccagctggctcctgatatcaatacgaataagcagtctctggatgaaatcaatacgagaatcaatgccatcgtgaagacgctgagaagttccggcaatgatttctttgatctggctggaaaactcagtgatctggaagattccctgggggatttgcggaacgatttaaacagctccaacagggatgaaatcctggatcatctgcaggtggtcgatgacaagctggaagagatcagtgaaatccttcagaacattcttcagacagcaggaggaatgccggcagaactggatgaggaggacttggcggagcagcaggaaactctgaacgatttactggaggaaacgtacggcatcctggacgatttggaatccgttgccggttctgacgctgtggatcgtcttcgcagccagctggatgcgatgaacggaaacggcctgggagacgcggccagcctttcaaagctggcggccgccgccaaggctcttcttcctgtggtatccggtcttcaggggcttgtgagcgatttggagcgcacgctgtccggagtccgcctgaatgacggcctggagagcagcagggatgcagccggtgagattggttccattatgggacggatcgagatgctgatcggtgatatcaacgatttaaacagaaccgttaatgaagataaggccggttttgacctgatgctcgatgatatggcagcctctctcgatcagatgagttccggtacgagccagctgattacgctgttaagaagtgtacagaacacggcgaaggccaaccgaagcgctgtggaaaacggtacgaaacagactctggacgggttgattgatattctggaaaaggctgcggacaccagtggaaccagcgggaaattaaaggatgccaacgaggacttgagaaccagcgtaaaagaggaactggataagatcgaggatgacacgaatctgctggaaatggatccgtcccggtccatgatttcctttacatcggataagaacccgtctccggccagcatccaggttattctgcgcacggaggagatcagcgaagaagatgtgaatacaaacgcggttgatatcgaaccggctgcacagaacgtcggtctgtggcagagaattgtaaatgtgtttgtgaaaatatgggatacggttaccggattttttaagaaatagcagccggaaacagagcgtaaaaagccttctaacctgatgagcgtcagggttagaaggcttttgtatttttcaatgcgtcagatatcggcagagtatctcgacgaacatatcgaataaaaccggagacaccgcactttcttctggtgttggtggaatataaggcagtaaaacctgacggtcaatcagttcctgataaggatgggaactggtgacagtgacgagcataattttccctgtggaactggacagcgatttcaggagagagtgtttggcactcacggagaagacgataagaagatcattttccatcattgaatcgctaagctcagagatattatcattggggaccgcgtgaaaaaaacgtcctgttttcatcataagtgtttccagaagagaggcgggttgaaaactcttagaaacaccagtggtaaataccctgttgaattgattgatatagcaggcaaggctgcgcatataagaatctgtaagtattttttctgcttctctcagaagctggttcataactgaaaaatattctaagtgttcacagtccggcatctgttgtgtcctctgttcggcaagccatgcgataagatctgcacggaaatcctgataccggctgtaaccgagcccttttacaaatcttgtgagagcgggctgagagacaccacaggcgtcagacagcgcactggtagtcatctgaacgattttgccgggatctttagatattttctgataaataagctggtcgttgggggtaaattctgtttttttctgttccataatctgaatgacattcatgaaatttatcattcctttcagtttgttcaaatcatttttaatccattcaattttaatgatacaattatattaccatattatagaataaaaatcacttctataaaccaaagttttataatagtatcaaataaaatatttggacaaaatgcacaaaaataaataaaatatttatgcaaaacaagtattttaaaatacggataataatgtataatatatttatgaagtaaataaatgatgaataaattatttaaaacaaggaggaagatggaatggcagttaactatgaaactttgcccggagaaattgtccggctcgttgggggaaaacaaaacatcaagggtcttacacactgtatgacgagactgcgctttgatctggcggactacggtaaggcaaagacagaagcactctcaaaaaccgaaggtatcctgaaagtcatcaattcaggaagccagtatcaggtcgttattggcaataaagtcgagtcagtctatgagtccattataaaacagacagggattaatggcggcggagtggtcgaagaggatgcatcatcggatgaaggggtgggccccaagaagaagtctggagtaatcaatcggctgatggatacgatatccggtgttctggccccaactttacacgttttggcggcagctggtattatcaagggactgattgcccttacactgaccctggggtgggtcagcgatacaagtggtctttatatgcttttgtattcgattggtgatggtttctactattttctgccaattatactcggatttacggccgcacgtaagtttaaaatgaatgaaatactcggtgccgctattggtgcaactctggtctaccccagtatggtcaatattgcttccaatctggcggtttccggaactatttttgcaggcactgcgtttgaaatgagctattataatacatttctgggaattcccatcgtcatgccgggaagcggatacacttccagtgtgattccaatcattattgcggtatacgtagcggcaaagcttgagaaggcgctgaaaaagagtcttccggcagctatcaggggaattctgacaccggttatcgttctgctggtaaccgtagtgtttacatacctggtgattggaccagtttccatgggcatctgtggcgtgattgcaatgttcgttacgtttctttacaatattccggttgtcggcggaattattgcaggcgccttaatcggcggaggttttggtatcctcgttatgtttggactgcactgggttattatctctctggggctttccacgattgctgttcagggctttgattacatgctggcatgcggcagcatcggaccgatgatcggtatggcgcagggaattgcaatctgtttggcggcagctcgtcataagaatcagaaggtcatggacttagcgcttccgggaacgctgtcccagatttgcggagtgggagagcctttgatgtattcggtattaattccgcttaaaaaagaattatacttaaatattttatcaggctgtgtaggcggtgccgtattgggacttctgggaaccaggatctatatgtttggcggcagcgggctgttttccttccccaacttcgtaagcgcagcgagtggtacaacggatttgatcaagtactgtatcggtgtagcggcaggctgtatctttgcatttgctgcggaactggtgatctataataacgacaaggcgaagaagcttctgtaatgaagcaggactataaagaatatgaagagaaaataaaaatgaatgacaacttaaaatttgatgcagagagaggtgagaccagaacgtatgaagcggctggtaaaaaaatcacctgcagagcttatcttggaattgtatactgtgaacggccggccgatcctgtccagaagctgaatatatttgttccggaggtgtatgaccgggggggaatgatcggcggatatacgaagcttaccgctccaatcttcgtacccaatacggttggcggctatctgccggggccggcggaagagccgggactgaatatcagaacgggaatgcccaattccatatttgcagcgctggagcacggctgtgtagtagtttccggcggtgtgcgcggaagaacctcgggaatgaaaagtacagagttttttgagggagggaaagtcgatgataccggacaggataatgggaaaatggtaggtaaagcaccggctttgattgttgatatgaaggcggtcatccggtatatacgccataaccgaggtttgattcccggaaatacggaacggatcatcaccagcgggaccagtgcaggcggagcgttgtctgcactggctggcgcaaccggaaacagccgggattacgtcccttatctgaaggaaatcggtgcagcagatgaacgtgacgatgtttttgcagcgaactgctactgtccgattcataatctggaaaattccgattcggcctatgaatggcagtttggcggtatccgcgattactgccgtacacgccataagaagacagaacatgggatagtccggatccaggaagatggaactatgacggacaggcagatggagctgtcagggaaactgcaaaaactgtttccggcatacctaaacagcctgaaactgaaagatgaaaatggaaacagtctgaatctggatgaaaatggggagggaagctttctggaatacatcaagggagaaatattaaaatctgccggcagagagcttgcattccatgaaacagccaatcacttatcagggctttcagcgccaggaagcgctgttaatacatttccggccctgaaaattctgggagaaagagtggtcgggctggactggaaggcttatatgaaagagattacccggatgaaaccggcccctgcctttgacgccacagatctcaagagtcccgaaaatgaggaatttggttcgatggatatggaagccaggcatttttcggaattttccatggaatatacggagacggaggcggagatggctcccgagcagcttattcgtatgctcaatccgacaaagtacattggaaaggcggatacggcaaaacactggcggatccgtcacgggtcattcgaccgggatacatcttttgcaattccggttattttagcccttcttcttaaaaataaagggtatgatgtagattttctcctgccctgggggcttccccacagcggagattatgatttacaggaattattcacatggattgacaccatctgcagataacaagaaaaggacggagaatacagtggagaagaatatttttggagtgaaaataatggctgctattgccgggactttggtcctggcgatgactgcatgcagtacttcctctgatcaagggaagaaagaagcggcatcagccgattcagccgccgagacggttgatgtggagaatcgtgaactggatacctctgaactggtatttgaacgatcgggggactctgtgaagctgacgagcggagacgaaagcctgactattacattgaaagctacaaagggcgcatttgacgctgccagcggagaggatgtgacggactggtttgtcacacagtctggtaatgcagtctttacgaacagcggggtggccatagtggaatccgtaaacgaaaacgggacgtcaatggaaattacattagatgcctcggcgattcagggattcaccgctggagggactgttgcaatgtatgttcagccggagaaacaggcggccaaggtaaatgtggggagttatacgattccggaactggatattacccttgacgcttccgaaggtgtggtggcggcaaatacctctggagcggcagcggtgaccggcgccgttgcatactttaatctgacaatgcctgaagaaaccgtaattgatgatgtgaatacggaggctgtgacgctggcaatgacagctggagacggttattgcgtggacgaatttacagatccggttgtcaggcttgatgaagctgtgtggtctgagggacggtatgagttccattttgacgagacggaagtggaaaaattgtttacgcgtaccaaggtaagaggcagcgaatcagaagtgtacagtgaaggcggccctgactggaccgcatttggcggaaatggtaatggacagtattattttaatctgacagtaagcgggctgacttatcaggggcttccggttccggattccacattccgcgtgtgttattacgtttacggaagagatgcttccgataaagcacgcatcaccctggctgattatataaatgtttatgattatgaagacacgggggccgaaaagcgtactctggctgagacagggcggaacgccgggaccgggaatgggatagcctggacgtggatcggagctgattatgaaggaaaaccgattttgtgtgatacggagcaggatgatttttatatcacatggccggaaggtgtggatgcgtcggcgctgacggcttcggatgtcaccgtaacgctgtacagccaatacggtgatgaacaaaggctggtgccagactcggagtattatgtttacagtgacagcagggagacacaaatcgctgttccctatgttcaaatggcatttacgccagtttatactaatatggtcatttctgtggaccgggctgcggtttccggcgcagatgatgcagcagaagaagcgttcacacagagttatgacatagcgtcggtatatgtctaccaggtacagcatggcgggctgaatcccaacggagcggtgcttgtgtaccagttttacggctttgatgaagatacgcttacagactggagccagctgatgcatggctttgagtatgcactttatattgaaaatgaagatggaaccaaagcgtattattcggaagaaaatggaggctgtcttgtggactcggccgatgccgccgccttatatgacgcagccggagcacaggatttgaatatccgcctctgggatcaggcggttatctatgatacaacatctgtaatagaaaatgaagacggctccaagacttacagaacggagacaaagacggttaatggggaaaatattacttttaacaaaatcattttgaccggatgggacgggaatgacctgcgcggtgtgcagatgatgcctgcggaggcgagagcaaatggattaaaaccggcggccggatatgcgttcccgcagacggatgatttttacgagaaatttaaaaactataactttggtcatgattactgggtggcacattccatgtggccgtgggtggaaggaatagaacgcggctggctgaccaatgctgatgatatgcatgcatcgtggaatggactggacaaggggtatcactttgaatacggcagcgatggccgctatcctgactggagcgcgccggaagcagagggcagcgataactggtggccctggctcagagacggttttcccgatggaatgtgggaagcagttgacgcggcaaatgcagatacctacaggcagtaagtgatcagattgggtaagaggatgaaaagagcggttttgcgaggcggaccgctctttttgtaaataaaaacaggctggataccaaaagaaataaagggatccagcctgttttccgtaattaacaggaatgcacctgataggaatcgaacctacgcacgcagctccggaggccactgctctatccactgagctacagatgcatctttcatattctactatattttcttatgaattgcaagtctatttttattgatttttatatcatagtttgttagaataaaacggagattgaatctccaggaggttaaggcccgtatgaaggacttgttagaaaacttaaaaaaacgtcttgcagatgaagaaaccgtccggtatttaaagttcatggtgattccgcttgtagtgattatcctgattatcgttatcgttgcggcggacaggccgcagggggaagagggagactcgacggcagatagttcacagatggaaattgggacggcggaaacgacagaagaagagaagacaggggacacagaggacaccgtatatcatctggaagaggcaggagatgagatccgcagcctgatggaggcttattttaaggcgagaaggacctgtgatatcaacggtcttgcagatgtatatggagacagtgcttcaccggaggaactgagggaagaaagcctgcggatggaggaagaagtaaaatactatcagagctacagcgatattgcctgctacagcgtaaacggccctgtggaacattcactggtagtctacacccggtttaatattaagttccgccagtcggataccgtggctcccagcctgtttgcctgctttgtgaagcggggcgcggacggaagctggcatatgatggcggaggtcactccggaagaaggggcgtacatggccagggtaaatgagtcggaggccgtacagcgtatggcggaagaagtaaatgtaagcctgcgggccgcgctggaaacggattccaatcttctggctgtctataacacgctgatgaacggcgaagagcagacgggcggaggagagagtgatgaaaccggtcttagtgaaggtactgatggcgaaggatcggttacagttcccggaaatgaagtgacggttgatggtaacggcgtaactgacagcggcgacgaaggcgcagacagtggaaatgaaggcatggacaacgggaattaaagtatcaggaaataaactgatcaggaaagaaacgacaaaacatacataacaacagatgcttctctgcgtggcaccgtgcagagaagcatttttcaacagaataaaggagaagagacatgaatgtaaaggattttaactttgaactgccgcaggagctgattgcgcaggatccgctggaggaccgttcgtcttccaggcttcttgtgctggataaaaagacgggtgaaatcgaacaccggacattccgcgatattctttcctacttaagaaagggggactgtcttgtcatcaatgacacgaaggtcatcccggccagactgtttggggtaaaggaaggcaccgaggcgaagatcgagatcctgctcctcaaaaggcgtgagaatgatatctgggagaccctggtaaagcctgggaaaaaggcaaagatcggtacggtcattacctttggcgaagggctgctgacgggtacggtggtggatatcgtagatgaagggaaccgtctgattcagttttcctatgaggggattttcgaggaaattctcgacagactgggacagatgccgcttccgccttacatcacccaccagttaaaggatcagacccgttaccagactgtttatgcgaagcatgagggatcggctgcggcccctacggcgggacttcactttacaaaggagcttctggcggagatcgaggcaatgggcgttgtgatcgcccatgtgacgcttcatgtgggactcggcacatttcgcccggtcaaggtggacgagatcgaagaccaccacatgcattccgaattctatatcgtggacgaggcggaagcgaagaaggtaaacgatacaaagaaaaacggagggcggattgtctgtgtggggaccaccagctgccgtaccgtcgagtctgcctcctcggatgacggcgtgctgaaggcggggagcggctggactgagatttttatctatccgggataccggtttaagacactggactgtctcataacaaatttccatcttccggaatccactctcgttatgctggtttcagcgcttgcaggcagggaacacgtgttaaacgcttatgaggaagccatcagggagcggtaccgtttcttcagttttggggacgccatgtttatcactgacctccatgagggagtgtcttccgatgatggagatcagaccgggaaggagaccggagagaggacggaaagatgaaatcagcagaagatttaagacagtttctccgctctgttgaccggaaggggtatcctgcctacaagggagcgaagggagtataccggtttccggactttaccttaagcatcgaccatgtacagggcgatccgtttgcatccccatccagggtcagcatccgggtggaaggaaagaaggcctgttttccgggagaatcctatcgtccgggttacaagcgtacagcactgcaggatttcctgctgcgtaagttcggcgcccaggtggaacggtataattttaaggcgagaggctcaggaaagagcgggctgatcgcggtcagccggtgcggccaggagatactggagagaactgcatgtgaagtggatcccggggacggaagcatactgatccgcatggaggtcggattcccggcgaatggaagaacgattaattccggggaactgattaagattctgttcgaatttctgccggagtgtgtggcgggaacctgtttttataaaaactatccggcgggagaaaaggcgaaggtgaaagctgtctctgaactggcggaagaccaggaggaagcgagaaggctgctgtctgagatgggacttgccgcctttgtggcgaacgggtctgttttgccgagagaatccggtgtatcggaccggccgatggcgaaggcggttccattttcctctccggcctcgatggaagtggtgatgaagcttcctaacgcaggggagattaaggggatgggaatccccaaaggcgtgactctgattgtgggcggcggttaccatgggaaatccacgctgctttcggccctggaatcgggagtgtataaccatatcgccggtgatgggagagagtacgtcgtcacagaggcatcggcggtgaagctgcgtgcggaggatggacggagcgttaagaacgtggatatttccctgtttattcagaatctgccggatttacgtgacacgaaacggttctgtaccgaggatgccagcggaagtacgtcacaggcggccggtgtggtggaagcgatggagagcggagcgaagacgtttctggtggatgaggataccagtgcgacgaatttcatgatacgggacgagctgatgcagatggtggtgcaccgggataaggaaccgattacaccgtttgtggagcgggtcagggcgctttacgacgagcagggaatctccacgattctggtagccggaagctccggcgcttacttccatgtagcggaccgtgttatacagatggactgctatgtaccgaaggaagtgactggagaggcgaaggaggccgcggccggattcggggagggcgtacggtcacttccgttaacaccggtttcttttgggcggataccgaagaagcttaagaccggaggcagggatgaacggtttaaaatgaaggttctgggccgtgacagcctgcagcttgaccgggatgtgatagaactccggtttgtggagcagatcgcggatacagagcagatcgccgctctggggtatctgttaaaatatgcgggtacgcatttcatagacggcaggcggaatctgattcagatcgtggacctgctggaaaagaaggttgcagcggaggggcttgcggcgctggcggacgacggatatctgccggttaatttatgcatgccgagacgccaggagatatttgcctgcatcgatcgctgccgcagcatgatctattgaggaacaggcggattttgaattagtaaaggggtcagtcatggaagaaaaaaaacatctggttggggggatttccagaaagacgctggaacgccttcctgtgtatcaccattatctggagcgcagagactgcgagggactcgtcaatatctccgcgccggtcattgcgttggacttacagctgaacgaggtgcaggtccgtaaggacatcgccatggtagcgcggtcggcgggaaaaccgaagacgggatatgtggtgaaggatttgatcgatgacattgaggaatttctgggataccataatacgaaccaggccgtcctggtgggcgccggttctctgggaacggcgcttctgtcctaccgcgggtttgagcagtatggcgtggaaatcgtcatggcttttgacgaagacgcggataaggcagggcagaagattggggaaaagatgatacttcccatggaaaaactggaaaatctgtgccggagaatgaacatccatatcggaattattacggttccggcggattccgcgcaggaggtgtgcgacaggctggtgaacggcggcgtgaaggctgtctggaatttcgctccgattcatctgactgtgccggatcacgtgctggttcagaatgagaatatggccgtgtccctggcggcactgtcgaagtatctctatgaagcggataaggatgcggtaagggggaacggtgtttgaatacggtattactggagtatgcggtggaagtggaaaagaccggatccatcacgcaggcggccggaaatctctacatggatcagccgaatttgagcaaggccataaagactctggaggaaggcctgggtgcgcctatattcaggcggacgcccaagggcgtcgttcccactgccagaggcagaatctttctggaatatgcaagaaacgtgctggcgcagttagaggagatggaagcgctttacaagcctgcgaagacgggcagtgtggaatttaccctgtctatgcccagggccagctatatcagcagcgcattttccaggtttgtgaagcggattgaccggaaagagggcatgaatctgtggcttcgggagacgaactccgccgatactctgcgcgatgtggagcggggggagtatcaactggggattatccgatacaagccgtccgcagaggcgtattacgcgaagcaggctgcggaatgcgggctgaaaacggagcttttgctggaatatgacgaacgcctcctgatgtcgcaggcccatcccctggcttcggcccggcacatagagagcggggatcttctgccctatattgagataacccatggagacgccaaggcttccggccgccgggagctgaaggctgcggacggtacaacggcgagtacaccggcgaaccggatctatattttcgagcgggggacccagatgggccttcttcatgaaaatcccgacacgtatatgtgggtatcccccatgcctccgtctgtcctgacacagcatgggctgaccgagaagccgtgtatcgacggaaatcaccgttaccgcgatgtcctcgtctacagaaacggatataagatggggaaatgggaacggctgtttctggaagagctggagcaggtgaaagcagagctggtgaaagatgactgcggccggcaatgatgacagaattctaataagtatttatatatcgatatttatatactgatatatggaaatttacatttgtattttctcctccctgagtctacaatgagatcagcataaaaataaggcgaggaggattttactatggcaagattcacattaccaagagatctgtatcatggaaaaggagcccttgaagagcttaaaaatttaaagggaaataaggcaatcgtggtagtaggcggcggttctatgaagcgttttggctttctcgatagagtaacagactatttaaaggaagccggcctggaagtgaaattatttgaaggtgttgaaccggatcccagcgtggataccgttatgaagggcgctgaaatgatgcgggagtttggtcccgactggatcgtggcgatcggcggaggttctccgattgatgcggccaaggcgatgtgggcattctatgaatacccggataccacatttgaagaactctgcattccgtttaacttcccgacactccgtacgaaggcaagattctgcgcgattccgtctacttccggtaccgctaccgaggtaacggcgttcagtgtaattacggattataataagggcattaagtatcccctggctgatttcaacattactccggatgtagcgattgttgatccggatctggctgagacgatgccggccaagctgacggcatttaccggcatggatgccatgacacacgccatcgaagcgtatgtgtctacactccactgtgattataccgatccgctggcgctgcatgccattaagatgatacataacgatttagcagattcctatcatggagatatggctgcccgtgaccgcatgcacaatgcacagtgtctggcggggatggcattctccaatgcgcttctgggcattgttcattccatggcccataagacaggcgccgcttattccggcggccacatcgtacatggctgcgccaatgccatgtatcttccaaaagtaatcaagtttaacgcaaaagaagcagaagcggcaaagcgttacgctgagattgcacgattcattggcctcaagggttccacagacggggagcttgtagatgcgctgatcgcagagctccgcgccatgaacgggaagctgaatattccagcctgcatcagagagtatgagggcggaatcatcgatgagaaagagttcaatgaaaaattaccgtcagtagctgagttggcagtcggtgatgcatgcaccggatccaatccgagaccgattacaccggccgagatggagaagctgttaacctgttgttactatgataaagaggttgatttctaaaaatctcctttcagtttagcaatgcaatgtgtgccgggggcgcaggatcgtatggtcctgcgcctctggtgcgtgaaaaagctgtttgacagcgttttttatctgtgttattgtatcagagaatcaaaaaagaaggggcaggactgaacggatgaaaaaagaagacgcagtgctggtggtcagctttggaaccagttataatgacagccgtaagaagaccattgaggcgattgagaagacgatcgcaggccattttcatgattatgagttccatcgggcttttaccagccgggtgatcattcagatattggagaaacgggattccatcgctgttgacggcgtgtcggaggcgatggagagacttttcaatcaggggataaagcgggttttgattcagcctacccatgtgatgagcggagaagaattcgatgccatgatggaagagatgaggccctatgaggctgcctttgaggcggtggccgtaggagcgccgctgctcacttcggaggctgactatgagcgtcttgtccgcattctggcagaggatacaaaggagtttgatgcagagggaacggagatcattctgatgggacacggtacggaacactccgcgaacgaggtctatgtgcgccttgccgaagaatttaagaagcagggatacagccggtaccatgtcggaactgtggaagcggtgccttccctggaagatatgaagcgggaggtagaccggacgggagcgcaccgggttgtccttcagccgctgatgatcgtggcgggagaccatgccaacaatgatatggcaggcgatgaggagggctcctggaagagcgtgtttcagtcggcgggatacgacgttgtctgccggttgaagggactgggagaactggaagggattcgcgagagcttcctggaacatgcgaaaatggcagtgcggtccttgactttaaaatagccctttgctagaatgacactattcgtatacgaggaaaaggacaggaattatgcaaaaaaaagtaaaaacagcggctgccgtggtttgtctcacggctgctgcttccatctggctgctgtcaggctgcgccagaaagatagaaccgattacaaagtccagttttatgctgaatacgtttgtaacagtgaccctgtatgatacggatgatctggatatcttaaacggcagccttgaactgtgccggtcctatgagaacatattcagcagaaccatagaggcaagcgagatatacaaactgaaccaccggccggcggatgagcagactgtgaccgtctcagacgatgtggcggccctgctggaaaaggggatttattacagtaaagtatcggatggtgattttgatattactgtagaaccgctcagctccctgtggaatttttcgtcggaggaccatgtggttccgtcggattccgagatcagggaagcccgggacaaggtaaactggaagaatctggagctgaacggaaacacccttaccttcggctcgccggatacggccatcgatttaggggccatcgccaagggctatatcgcggaccgcatgaaggactatctcgtgaaggaaggcgtgaagagcgccgtcatcaatctgggcggcaatgtgctctgcgtcgggaagcgtcccgacggaacaccgtttaaggtaggccttcagaagccctatgccgaccgcaatgagacgattgcaacgctggacatcgacgggatgtccgtagtttcgtccggtgtctatgagcgccattttgtaaaggatggggtgaattaccatcatatcttaaaccccagagacgggtatccataccagaacggactcgtatcggttacgattatttccgatctgtcagtcgatggggatggtctttccaccacctgtttctccatgggactggaaaaggggaaggcactgattgattccatcgacggagcctacggcgtgtttattaccgatgactatgagattgtatattcggagggagcagagaagttcctggataaagaatcttaaggattcctttattcacggggatttgctttacatttttccggcgctatactacaatagaagaaatgtatttctgacaggagcagtatgatgattaaaaaaatatgggacaaggttatgaaccgcgaggttatttcatatctgatcttcggggtgctgaccacactggtgaactgggtagtctatgcggccatggtaaaggttcatatcgattaccgcattgcgacagcggcggcatgggctgtatctgtcttgtttgcatttattgtgaataagatttttgtatttcagagctataatctgcgtccagcctatgtcatgaaggagatcacgtcgtttgtggcgtgcagagccgtgtcgggtgtgatggagatggtctttatgattgtcatggtatcatggattcatatggacgagtatatcagcaagattgcagtttctgtgattgttgtaattgttaactacgtattcagtaaactttttatattcaggaagagcgaagaaaaatccctgtgaaaggttggccggagtacggccaggtaactgcatatggaacgcgatgacgagattgaaaagatttctaaagaactagaggacatactaagaatgacatcagagaaaaaacggagcagtgaagaaactgaaacggaaaagaaaaatttgataccttcggagaatgggacggataaaaagacgccgtccgcttccctggaggatttttcacttatactggatctgggggatggagacgtggtgtcgtcggactctgcggaggtttcacctgccggcggagacggggaagaggtgccgggaacggtgcagtccccggcggaaggcggccctgtttcctcagaaggcggccaggttccggacgcggcggagccgctctccgggctggattcggtgcaggaagatccaccggatctttttctggagcccgtggaatcggaagagtacgattatgaggaagatatggaatttccggatcaggaagcccttgaattttcggatcaggaagagccggcttacgatgagcgtgacgggaaacggaggcgggacggcagagaaagcatctgcctgatacgtccgtcggacggacttgtggctgcgttttttgtgccggttattatcatgatcattatctttgcccagcgcgggatattcccgtttggggaagagagcttcttaagaacggatatgtaccaccagtatgcgccgttcttttctgaatttcagcataagctgacccatggcggcagcttcctgtacagctgggatgtgggaatgggcgtgaactttgcggccctgtatgcatactatctggccagtcccttaaactggcttctggcgctctgtcccaaggcgtatatcatcgagtttatgacctacatgatcgtgttcaagatcggtctcagcggcttaagcttcgcttattatctgcggaagcactgcaggacatcggacttcggcatcgcctttttcggtattttttatgccctttccggttatatggcggcttacagctggaatatcatgtggctggactgtatccttttgttcccgctgatcatgctgggactggaacgcctggtccgtgaaaagaaatgttttctctattgcattactttaggattatcaattttgtcaaactattacatatccattatgatatgtatttttatggtgttatacttcatcgccctgctggtgatggacggaaagaaatcgtggagcgattacatggtaaatatcagctcctttgcggtattttccctgctggcaggcggtctggccgcggtggtgcttcttcctgagatttatgcgcttcagatgaccgcgtccggggattttaactttccgaagacggtgacttcgtatttccccatcttcgacatgctggcgaggcatctgccggatgtggagacggagatcggtttggaccactggccgaatatctactgcggcgtggctgttctgatgctgtttctgctgtaccttgtaaaccggaacatcagacggcgggaaaaagtggtgtactgcgggctgctgctgttcttttttgccagcttctcgttcaatgtacttaattttatttggcatggattccattatcccaacagccttccgtgccgccagtccttcatctatattttcctgatgcttctgatgtgttatcaggcgtacagccatttgaaggaaacgccctggaagcatgtggtgctggcctttttcgcggcgatcgcatttgtgctgatggcccagaagctgattacggatgaggcgtaccatttttccgtgttctatgtggcgattctcttcctttcggcctatgcggggctgatctgcctgtatcagaagggggcgagccggaatgtcgtgattcttctggccctgggcgtcgtttcagtggaagcggcggtcaatacgacggtaaccagtgtcaccacgaccagcagaaccagctatgtaaaggataatgacgccagcgtaagtctgacggaggggattaccgatcccacattttaccgggtggaaaaggtcagtaggaagacgaaaaatgacggcgcatggatgaatttcccgtccgtatccctgttctcgtcaacggccaatgccgacttatcgaagttctttaaaaagctgggatgtgagagctccaccaatgcatacagtatcaccggcagtactccgctggtagattcgctgttttccgtgaaatacgcactgtattccgagacaccggcggataccggccttctgacacctctggaggtggaggaccatacgtatctctaccgcaatgaatatacactgccgttaggcgttatggtgccttacgatctggaggacaactggcagctggacatcaccaatcccgcggacgtgcagaacgatctggctgtggtgctgggagcagaccctgtgctggaggaagtgccgagcgagattctcggaaccagctttacctttagaccggaagtatcgggcgactattatgtttacgtgagcaacaaaaaggtagaaaaggtaagcgccctgatgggggaaaatacgaagagctttgacaacgtgaaccgcggatacatgctggagctgggctggattactgccggcgaggaagtgactctccgcaacgacgacaacgagcaggatctggtagccgtggcgtaccgttttatcccggaaggactggaatcggtctatcacgtgcttaacagaaattccatggaactgacaaagaaaaccgatacagagattaccggaagaatcgacacagaaaaggcagggcttctctatttaagcattccctatgacaagggatggtccatatacgtggatggtgaggagacagaaccatataagctgttcgacacctttttaagcgtacggctcaatgccggaacgcatattgtggaattgcgctatatgccgcagggcttaaagacaggcggtatggtcacggcgggaagcgccgcagtgctgcttctcatcgcaggaatcaccgcaggccgcagaaagaaaccggtcatgcgcagaagaataaaatgctaaggagaaatgtgatatgaaattatggggcggacgcttcacaaaagagacgaaccaactggtacacaatttcaatgcctccctttcctttgaccagaagttttaccatcaggacatcgaaggaagcatagcccatgtaaaaatgctggcgaagcaggggcttctgacaacagaagacagagatgcgatcatagagggactggagggaatccgcagggatttagagagcggggcgctggtatttacggcggagcatgaggatatccattcctttgtggaagccgtcttaaccgagcgaatcggtgatgcgggaaaacgccttcacacaggaagaagccgcaacgaccaggtggccctggacatgaagctgtacacgagagatgagatcgatgagttagatggtctggtgaaatctcttctggaagagctgttaaagctgatggaggagaatctggacacctatatgcccgggtttactcatttacagaaagcccagcctatcacgctggcccaccatatgggggcttactttgagatgttttaccgcgaccgtacccgcctttcggatatcagaaaacggatgaactactgtccgctgggatccggcgcgctggcaggcaccacctacccgctggaccgggagtatacggctgaacttctgggattcgagggtcctacgttaaacagcatggattccgtggcggatcgtgattatgtcatcgagcttttaagcgcgctgtcgaccatttccatgcatttgagccggttctgtgaggagattatcatctggaacacgaacgagtaccagttcgtggagatcgacgattcctacagcacaggaagcagcatcatgccccagaagaagaatccggatatcgcggagctgatccgtggtaagacgggccgtgtctatggggctctcgtgtcgatcctgacgacgatgaaggggcttccgctggcctataacaaggacatgcaggaagacaaggagatgacatttgatgccatcgatacggtaaaaggctgtcttgcactctttaccggaatgatctctaccatgacctttaagaaggacgcgatggaagcgagtgcgaagaatggctttaccaatgcgacagatgccgcggattacctggtaaaccacggcgtggccttccgcgacgcccatggaatcgtgggacagctggtactgtactgtatcgggaaggggatcgctctggatgagatgtccctggaagaatttcaggcgatcagccccgtgtttgaggaagatatttatgacgccatcagcatggagacctgcgtgaaaaagcgtatgaccatcggcgcacctggccaggaggccatgaagagggttatagaagcgtgcagagagaggctgtgaacgtcatagtaacaaccatattctggaaatattctcagaaaaactattgcattcctctaaaggggaaggtttatactaaagtatattagatgtttatacgtgagggtaaatcaaaatctgatcagaggaggctgtatggtttgctatgggggtaaagcaaagcacaaaaaaattatattcgatcggtgaagtcagccggatctgcaacgtatcgaaaaaagcacttcgtttttatgaccagatcggagtgatctctccggacatggtaagcgaggagaataattaccgttactacagtgaggagacgctgcttctggttccggtggtcaagtattataagcagatggggttcagtctggagcagatgcagaatctggtggaaggcagtacatatcaatgtctggagcgaagctttctaagcaaaagtgaggagctgcagaacgagcggcaggagcttttataccggtataccgccgtgaaggactggtatgagctcgtccgtgaggcagagcttgtttctcagcgcaaagaacacgacgtgacgatcaaatatgtgaattccaccgtgtactgcagtaaagagcaggacttttcgtacaattacatggaatccatcatcaatattccgtgggtaaattatctggaaagcatccataatgagattaccggtccggttattttaaatttcccgtcgttccgtgaaaagcgggatgggacttgtaaacgggccagaattatgcagatgccgcttcgccctctggtaaaggaggcggagcttaagacgctgggaggcaccatgatggcttcggtctatcacgtcggatcgctggacacaatcggccgggaatatgagaagatcgaggagtgggcgctgaagaaaggatatctctgcggtgaggagtcttttgaacggtatgtggtggattactggaccacgcgggtagcatcggagtttgtgacggaagtgctggtaccggttaccaggatggaagagtgcagataatttgagaagctcgatggggaacggaaaatatttgtgaaaattgaataagaggatgctgaaaccttccccttgaggggaaggtttcagagagacaaccatagcttcacaggaacatggttgtcttttttttatgcaaatattcagcttgcgtcagtttacgggtattgttattgttttaacattaccctaaggggaaggtgtattatgcacttttacctgtaatatgcaaaataatatttagaaaaacaaatagaaatgtttataatataaaaattatttagatttatcccgataaaaaagaggcttgacattccacatagggggaggggatatactaaatgcatataaaaaagatggattgaagagaaaaattagatattgtatctaatttcggaatccagaaggaggaactttcatgaagtacgatgcattgggaatgattgaaacaaaagggctggtaggatcgatcgaagcggcagacgccatggtaaaggctgccaatgtcactttaatcggcaaggagcacgtaggaggaggtctcgttaccgttatggtgagaggtgatgtgggagcagtaaaggctgcgacggatgcgggagcggcagcggcacagcgcgtaggcgagctggtatccgtccacgtcattccccgcccccatgcagaggtggagtgcatccttcctgtctgcagaaaacctgaataggaggaggtcgcgcaggtgagatattacggagaagaggcactgggactggtggagaccattggtctgacacccgcgctggaagcagcggataagatgttaaaggcagcagacgtggaactcatttcctacgaaaacgtaggttccacccttgtcaccatcatggtcaagggagatgtggcggcggtgcggtcttcggtggaagccggggcagcggcggcggcagccatcgggaagctgacggctaagaatgtaatgccgagaccgattcagggagtaggcgatattgtatccgtacacgatgttgatgcgtaaaaacagaaaatcggcaggaaggaagaaagtatatggaaagatatgaagccattggttccattgaaacatttggcctggtatttgttctggaagccgcggatgcgatgtgcaaggcggccgatgtggaactgatcggatatgagaatgtagcttccggatacatatccgtgctggtgcgcggcgatgtgggagcatgtaagacagcggtagaggccggagtaaaggccgtggaagccatgggagccgaggtttacagctccgttgtaatcccgaggccccacccggatctggagaagatcatcacacgttactccttaaagaatcttctgccggcggagtaaggaaaggaagcgtagacaatgcgttttgttgataaagacctgctctctgtccaggaagccagaatcctgatggaaaatgcaggagaagcgagaaaagttctggctggttttgaacaggaaaggctggaccgcattgtagtacatatggcgcaggcggcggaaaaacacgccagagagctggcggttatgtcctgcgaggagacagaatatggaaactggcaggacaaatacagaaagaaccggtatatctgtaaatacctgccagccgaactgaagaatgcgcgctgtgtgggaatcatatcggaggaccgggaaaagaaagtgatgaaggttggcgttcctctgggaattatcgcggcgctgacccctgctgagaatccggtatcaacggcagtctatcaggcgctgatcgcggtaaaatcaggcaatgccatcgtctttgcacctcatgagcgggccgttaagacaacggcaagagcgcttgatattctgatggaagcggctgctgaggcaggactcccggacggcgcgctctcgtatctgggcacggtaaccaggcagggaacggaagcgctgatcggtcatccggccgtgtctctggtgatcagtaccggtgttccggagatgacagaggccgtgaaggccgcgggaaaaccgtttatctatggaggcactgtgggatctcccgcgtttatcgagaggacggccgatattccaaaggcggtgaaagccattgtggccagccggagcttcgactgcggaatcgtgccggcggcggaacagtatatcgttacagacagctgtatcgccggtgaggtgaaacgggaattccagaggaacggcgcctactttatgtcgggagaggaagagaaacggctgattgggctgctttgtcctgataacggcagccaggaccctgagctggttggaaaaccggcccgggagctggcccagagagccggattttccgtcccggatgccgtgaaggtgctggtatccgaacagaaatatatatcagacagaaatccttacgccagagcgctgctgtgtccggttctggtgtattacatagaaaatgactggattcacgcctgtgaaaaatgcatcgagctgctggcgaatgagagccacggacacacactggtgattcattcgaaggatgaagacgtcatccgccagtttgccctgaagaaaccggttgccaggatgctggtgaacaccccggctgtattcgggagcatgggggtgacgacgaatctgtttccggccatgacgctggggagcataacggcgggagtcggaatcacctcggacagcgtctctcccatgaatctgatctacatcaggaatgtgggatacggagtgcgggagatcgaagaccggatggcaggcggcgtccttaagagtgaagcagagaacggcctggatgacgacctggagcgggcgatgaagaagcttctggagtggatggccgaagaaaactaagcaggaaagaggggtaacacaaattggatattcgtgagtttacagataaatttacagatgcgaccagaaatatgtcgccggaacagcgggctgcgctggtgaagatgctggaatctgtttccggtgatctgccgaagagcgctccggaaaaaagcggagtatacagcggggaaggcacagcggttccggatgggatcacagagcgccttcagcttttgaaggaaaattacttgaaacaggtaccttccattacgacttaccgcgcgagagccatcacaaagatcgcgaaagagaatccgggcatgccgaagattcttctccgcgctaaatgtttccgttactgctgcgagacggcgccgctggtcatccaggaccatgagctgatcgtcggagcaccgtgcggagcgccgagagcaggtgcattttcaccggatatcgcctggagatggatggaggacgagatcgataccatcgggacccgtgcccaggacccgttctacatttcagaggaagacaagaaaatcatgagagaggagctgttcccgttctggaagggcaaatctgtggatgagtactgcgaggaccagtacagggaagcaggcgtatgggagctttccggtgagtccttcgtttcagactgttcctaccatgcgttaaacggcggcggggattccaaccccggatacgacgtaatcctgatgaaaaaggggatgctggatatccagcgagaggcgaaggagcatttggagcagctggattatgagaatccggatgacatcgagaagatctatttctataaatccatcattgataccaccgaaggcgttatgatttacgcaaagcgtctgtctgaatacgcggcggagctggctgcaaaagagacggatccaaagaggaaagcagagctcttaaagatatccgaggtcaacgcccgggtaccggctcataagccggaaaccttctgggaggcgattcaggcggtatggaccatcgaatcccttctggtagtagaggaaaatcagaccggtatgtccatcggccgcgtggatcagtatatgtacccgttctacaagggcgatatcgaatccggccggttaaatgattttcaggccttcgagcttgccggctgcatgctgattaagatgtctgaaatgatgtggatcaccagcgagggcggttccaagttcttcgccggataccagccgttcgtcaatatgtgtgtaggcggcgtgacgagagacggacgcgacgcgaccaatgacctgacgtatctgctgatggatgctgtccgccacgtgaagatttaccagccttccctggcctgccggatccacaacaagtctcctaagaaatatatgaaaaagattgtggacgtgatccgctccggcatgggcttcccggcctgccacttcgacgacgcccacatcaagatgatgctggcaaagggcgtgagcatcgaggatgccagagactactgtctgatgggctgcgtggagccgcagaaatcgggccgtctctaccagtggacctccaccgcatatacccagtggccggtctgcatcgaactggtgttaaaccatggcgttccgctctggtacggcaaacaggtctgcccggacatgggtgatttgagccggtttaagacctttgaggaatttgacgcagccgtaaaggaagagattaaatacgtgacaaaatggaccgatgtggctacggtgatttcccagagagtccataaggaactggctccgaagccgctgatgtcgatcatgtacgagggctgtatggagaaaggaaaagacgtttcctccggcggtgcgatgtacaattacggcccgggtgtcgtatggtcgggtctcgccacctacaccgactccatggccgccatcaaaaagctggtatttgacgataagaagtacacactggagcagctaaacgaagcgttaaaagcggatttcgttgggtacgaccagatcaaagcagactgcttaaacgctccgaagtacggcaatgatgatgattacgcagatctcatcgcagcggatttagttgattttacggaggcagagcacagaaaatacaagacgctgtattcccatttaagccacggcacgctgtccatctccaacaatacaccgtttgggcagatgacaggggcttcggccaacggccggggcgcatggctcccgttatccgacggcatcagcccaacccagggcgcggactacaaggggccgacggctatcattaagtcggtgtccaagatggcaaacgacagcatgaacatcggtctggtacataactttaagatcatggcaggcctcttagacactccggaaggggaagagagcctgatcaccctgctccgtaccgccagcattttcggaaacggcgagatgcagtttaactatctggataacaatacgctcctggaagctcagaagcatccggagaaataccgtgacttaatcgtccgggtagccggatacagcgcctttttcgtggaactctgcaaggatgttcaggatgagattatcagcagaaccatgctgacccatttataaaagaactggaaattggagatgaatgacgatgaatcagacacatgcaggttcgattgaacgcaaggctctgatatttaatattcagaagtataacatgtacgacggaccgggcatccgcaccatcgtttttttcaagggctgcccgctgcgctgcaaatggtgttccaatccggagggaatggaccggagttttcaggtcatgtttaagaaacgatcctgtgtggactgcggggcgtgtgcggctgcctgccccgcggggattcacgtgatctccccggagaccggcaaacacgaaatcttaagagaccgggactgtaccggatgcagaaaatgcatggaggcatgtccccgggaggcgctgacgatctccggcgaggtcaggaccatctcggagctgttaaagattatttccgaggatgaggccttctacgagcagtcggggggcggcgtgacgctgggcggcggagaggtgacttcccagccggaggcggctttaaatctgctgatggcctgtaagcaggagggaatcaacaccgccatcgagacctgcggctttgcgaagacggagaccatcctaaagattgcggagtatgtggatttatttctgttcgatatcaagcatatggacccggagcgccacaatgagctggctggtgtaaacaatgaactgatcctggaaaacttaaaggagcttctgcaccggcgttacaacgtcaaggtaagaatgcccatgttaaaggggattaacgacagcagggaagagatcgaccaggtaatccggtttttgatgccgtttcgggattataagaactttaagggaattgacctgctcccataccacaagatgggggtaaacaaatacaatcagctggaccggccctatcccatcgacggagatcccagcttaagcgacggggatttatcgcggatcgagggctggctgaaagaatatcagttccctgtcactgtggtaagacactgaaaggagagccatggtgggaaaggaacttaccggcgttagccgggtgatcgaggaatccgtacccggcaaacaggtcacgatcgcccatgtgattgcatcaccggtgccggaggtgtatgaatgccttggaattgacgcagcgggagccatcggtatcctgacgctctccccatttgagacggctgttattgctgcggatatcgcggctaaggcggccgacgtggaggttggatttttagaccgcttcacgggatcggtagtcatagccggagacgtccagagcgtggagacggctcttgcctccgtctgccggacgcttaagaccgtgcttggctttgccgtgacaccggtgacgagaacatgagaacgaagagaattatggtaataggggctggcgggagcggaaaaacgactctggcccatgcactgaacggcgatcactctccggtaaagcggacgccctgtctggtctacggggcacggacgatcgatgctcccgccgcctacttggaatctccctggatggtacagcacctgattgcggaggcccagaatgcatctcatgttctgatgctggtggatcagacaaagacgagggaggtatattcccccggttttgccctggccttccgtgctccggtcatcggagttataacaaaggcgggaaagagccgggagcagctggaacggtgtgaaaaggaactgttaaaggccggggttcagcctccgttttaccgggtggtatttccctccagggaggggcttgatgaactggagagacggctgaacagctattaaaattcaggagaaaggaggcgggaataaaatgaaacagtttattatgaaaacaaaagtgtatctcggggaagcttctctggaaacgctccgggatatgggaataaaaaaggcgtttgtgatctgcgatccgtttatgaaaagttctcataaagtggatatggtgacggagctattggaggaagcgggagcagaattcacggttttcgccgaggttgtgccggatcccaccattgcggtggtgtctaaagccatcgaacagatgctggtatgcagaccggacgctgtgattgcgctgggcggcggctcagccatcgatacggcaaaggcggcaggcctgctttactccggcatgagccagacggagcggccggaactgattgcgattccgacgacgagcggaacgggaagcgaggttacctcctttgctgtgatctcggacccggaaaaacaggcgaaatatccgctggtggacgattccatggtgccggatacggcgctgttggacccgcggtttaccgtttcggttccaccccatattacggcggataccggcatggatgtgctgactcacgcgctggaagcatacgtttccacagacgccggcgacttcacggatgcctgtgcggagaaagcggtccggctggtatggcgttacttaaaaaccgcggtggaagacggaagctgtatggaagccagggagaagatgcataatgcgtcgtgtctggccggcgtggcatttaacggggcatccctgggaatctgtcacagcctggcccacgcgctgggcggaagatttcatattccgcacggaagaagcaatgcgatgctgctctgccatgtgatcgcttacaatgcggggctggatactccgggagagacggcggccttaaaacggtacgtggaagtggccaatatgctgggaatctcggcgggaaccgacaaggcgaccgtacacggactgatccgtcagatcaggaatctgatgaatcagatccatattcctcagtatataacggaatgcggcgtggacagggaggaattcctggaggccgcaggcgatatggcactgcttgctttggatgacaactgcacggtgacgaatcccagaaagccgtcgaaagaagagttagagaacttataccggtgtctgtgtaaagggggatattgatgaaatacataaccgaagcggatttgagagatttataccgcaccaccccttttacaacgtatgaaacggaaccggggacacggctgacgccgggagccaggcagtttctgggggaccgtggaatccgggttccggatgaatgtatttctccaaagaagtttagagacaacgggacttctgaaaagactcttaatgaaacagcagtcggtaaaaagaaactccaaaaccgccttaaatcggcccgggccttatttttggaaacagggcttcagtttaaggagcacgatgtgcttctggcccagcggatctttgttatggagcgatgcctggcagggctgtctgaagaggcggaaacgtgtctgctgccgtgtcaggcctgctccggaatcggcccggataatttttctgaggagatggaggactgtttcgagattaccgccttccacgtccagtcagaccgggggctggatttaatccggcttcaccgactgcgctgccttttgcgggaactgggcccttacgtggaacaggagctgggagacggcaaaaagcgggagcttcatcaggtgattaatggtttatcccagttaatatgccagttatttggaggaaatacatgtcaaaagaaggaataacatttgaggaatgcgacagcctggtaaaggagttcgagcgagtcgtaaaaagcccggtaacaaacggttcttcagtctattacaccggagtggatttagggacggcctgtgtcgtcgtggcggttctggatgaaaactttaagcctgctgccggcgcttaccggtatgccgatgtggtgcgggacggtatggtcgtggattatatcggcgccatccggatcgtccgggagatgaaggaggaactggaggaaaagctgggctgtgaactcttatatgcggcggccgccatacctcccggaaccgatgaactggattccggagccatcaaaaatgtggttcagggcgcgggctttgaaatcacagcccttctcgatgagccaaccgcagccaacgccgtgttaaagattaagaacggcgcggtcgtggatatcggaggcggaactacgggaatctccatcttaaaagatggaaaggtggtttatgtggcggatgaggctaccggcggaacgcatttttcactcgttatatccggggcctacgggcttcccttcggggaggcggaacgctacaagcgggacccctctcaccataaggaactgttgccggtcttaaagccggtggtggaaaaggtatcttccatcatcaaccgccatttagaaggccatcaggtggaagggatctacttagtgggaggaacctgctgcctggcggggatcgaggacattattgaaaagagaacgggaataccgacgtataaaccggataatcccatgtttgtaaccccgctggggattgcaagaagctgtacccgggaggcctgtgagtgaaatgaggtaatgtgacatggaaatcagaatcataaaatcaccggcgcaaggcaccctcgatatcctgttaagaagaaagggatcgggagcatcgatccccatcgagtcggtggatgcggtcggtctggtccagggccggatgattgagatggtgtgcgccgccgatgtggcggaaaaggcggtcggcgttaccgtggaagacattcgcggaaactgccctcagaatatggtgctgctggctattttcggggataccgcctctgtggaggcggccctcggggaaattaagcggaaagagaaagaggggacaccggaatggtaactgcaaagctgatcggcaatgtctgggcaaccagaaaagcggaatccctaagcggatttaagtttatgatggcggagatcatcagcgggacgagaacgggagagcgaatgatcgtggtggacaccatcagcgccggaatcggagaccgggtgatcataacgaccggttcttccgcgcgccgtatgctgggcgacgacgggattccggtggacgctgtggtagtgggaattattgatgaagattgtgaatttatatagaagaaacaggcgtttccaacagatagattcgcagacaagaagggatgtggtaccatgaaaaagttagtttgcgccagagatatcgaggagtgcggcaaacagggaaagagcgagtactgcgtggacagtgacacaatcattacaccttccgcaaaggatgcagctgaggcgtatgggatacggtttacggattctataagccagccggaatcggcctgtgccggtgtgtttgcgggactggataagatggacgccgcgggactctgccagctgctgaaaacaatactggagcagggcggtttacagacgccctctaagccatacgaagaggaacaccatgggaacggtttaaaggtggttcgcggaagaaccgtgaaaatggatgtgtttgacacgggaaatccggaggcgacagcgtattttcaggaactggtcagcaaggatgaatcccatatcagcgccggtttcctgattattgaaaactcgaaatttgactgggaactgacgtatgaagagatcgactatgtgatcgaaggcacactgacgattaccatcgatggaaagacgtatactgcccatgccggagacgtactgtttgtaccggcaaattccaaagttgtatggggatctccggaccgggcgagagtgttctatgccacatatccggccaactgggcggatttgctgtaaggaggtagccatgatggcacttggactgatagagacaagaggcactctggcggctgtggaagctgcagatgccatggtgaaagctgcggatgtcacgttgattgaaaaaacgcgcgtaggcggcgggctggttgccatagcggtgaccggtgacgtggcagcggttcaggcagcggtggatgccggtgcggcggcggtggaacggatcacggcttccagcctggcagcaagactggtcattccacggcctcatgaggagcttgatatcctgtttacaccggggaaatccggcgggaagccgggcgcggatgtggaagtgagagagccggaacctgctgaaataccggaaaacgctgtggaattggaagtgtctgcccttccggagaaactggaccgccagaccctggattccatcgttgaacagtacggcgctgccgaaggcctggcaatggcggacagactgaaagtaacagcgttacggacgctggcccgtgaatacggagaactgaagatctccggcagggaagtgtccagagcgaataagcaactgctgctggaggaattaaagaactattacgaaaatcgaaatgactgacagggacggagcgcggctgaacgttcattccggccgtcggaatccatttccgtgaacagtcaatgatccgcggatcatcgcggaaacaatatagaagaaaaggagatcctgacaatggaaaactttgattttgatttgcgttccatccaggaagccagagatttagccagaaaaggagaaatcgcggcgaaaaagatggctacctactcccaggagcagatagagataattttacagaatatggtaagggctgccgaggaacacgcggtctgccttggaaaaatggcagcggaggagaccggcttcggaaaggcggaggataaggcctataaaaatcatgcagcttccaccctgctgtatgaagagataaaagatatgaagaccgtggggatcatcgatgaagatccggtaaaacatacgatggatgtggcggcgccggtggggctggtgatgggaatcgttccgtcaaccaatccgacgtccactacgatttttaaatcgattattgcagtgaaatcaggcaatgccatcgtattttcccctcatccgtctgcggcaaaatgtaccctgaaagcggcagaactgatgcgggacgcggcggtggaagcgggggctccggaggacatcataggctgtatcaccatgccgactatgggagccaccaatgaactgatgaaatgcaaagaggtgaatttaatcatcgctaccggcggcccgggtatggtaaaagcggcgtacagcgcgggaaaaccggctctgggagtgggggcaggcaactccccggcatacatcgagcgcacagccgacatcaaacaggctgtcagcaatatcatggcaagcaagaccttcgactacggtacgatctgtgcctccgaacagtccatcgtcgtggaggagtgcaataaagatgcggttgttgcggaactgaagagccagggcgcctattttatgacgccggaggagacagagaaggtttgtgcgctgcttttcaagagcggaagccacaatatgaatgcaaaatttgtgggaagaagcccacaggtcatagcggaggcggcgaagattaccattccggccggaacgcgggtcctgatcggagaacagggcggcgttggcgaaggatatccgttatcttacgaaaagctgactaccgtgcttgcgttctataccgtaaaggactggcaggaagcctgcgaactcagcatccgtctgcttcagaacggaatcggccacaccatgagcatccacacagaagacagggagatggtgagacggtttgctgcaaaaccggcttcccgtattctggtcaacaccggaggaagcatgggaggcaccggaatcagcacgggactggcaacctcctttaccttaggatgcggaacctgcggcggcagttctgtttctgaaaatgtaagcccgaagcacctgattaatatcaaaaaagttgcgtttggggtgaaaaattgtgctacactggtgcaggaagataaaaccttccgccatccggagctgtccccacagtccagctgcggcggaacctgcagtacggccgccagcccggcggatttcgtggcttccttcgacaggaaacagtcttcctgcgggactgcgtgtgagacacatgcaggaaccagtgactgtgacagcgataagctggcggcgcttgtaagagaactggttatcgccatgaagaaccagtaaagcgtcagaaggaggaaaccgatggatcagtatgaggcaatgatcaagcttcttttggaagcggtaaagaatgaaggcggaacagcttctggagacgcgtccgcgaaaccgcgtgcgaacacggtgccggtcggcatatccaaccgtcatgtgcatttatcccgggccgatttggataccctgtttggctgtgggtatgagttgacaaaggcgaaggatttatctcagcccggccagtttgcctgtaaggaaaccgttacggtctgcggaccgaagggcgccattgaaaaggtaagaatactgggaccggtcagaagcaggacacaggtggagattctggccggagactgttttaaactgggcacgaaagcggaaccgcggctgtccggtgatttagacggaacgccgggaatcactctggtgggaccgaagggatccgtgcagacgaaggagggcctgatggtggcacagcgccatatccacatgcatccggatgatgcggcagagtttggcgttcacgacggccagtctgtttcgattgaaatcgatggaatccgcggaggaatctatcgcaacgtggtaatccgtgtaacgccggattccgcactggagtgccatgtggatacagaggaagccaatgggatgggactcggaggcgctgcgacagctgcgctcataatagaaagcagtaagactgatatataaaataataaaaaattcaggaggattttacaatgaaatacgatgcattaggaatgattgagacaaaaggtctggttggatctatcgaggcggcagacgccatggtgaaagcagcaaatgttacattaatcggcaaggaattcgttggaggcggcctcgtgaccgttatggtaagaggcgatgttggagcagtaaaggcagcgaccgacgcaggcgctgcggcagcccagagagtaggcgaacttgtatccgttcatgtaattccccgtcctcacgcagaggtagagaccattcttccggcggcagcaagggaagaatagaaggaattcaaccaataaggaggggttacaggcatgaatgaaggtgcaggtgcagcggccattgctgcgaagaaaaaattatctgctcagttttttaagaagggtgtatttgttgcgatcttgtccggtatctgttacggattatactccgcgtttatgacactgggaatgacaaagggcgtatgggcggactggtatggtcccaacacggcggcactgtccgcttttgtcattacatatctgctcggctcgctgggaagtgcaatcaatgatacgtgcagcgcggtgtgggcgcttctgatcgccggaatcaagggaaaactgggtgactttttccgctgtttaaagacgaaaccaggttggatcatgattgccgcagcactggtgggcggtcccatctccagtgcggcctatgtggttggacttcagatggcaggatccattgttattccgatttcggcgctctgccctgcaatcggtgcgattttaggaagaatcctctataaacaggaactgaataaacgtatggtagcaggtattgtgatctgtgttctctccagctttatgattggaagcaccagccttggcggtgacgcgccggagggcagactgctgggaatctgtattgcatttatcgcggctctgggctggggaatcgagggctgtgtggccggatacggtacgactctgatcgactatgagatcggtataacgattcgtcagtgtacttccggactttccaacctgtgtattctggttcccatttttggtatcattgccggcaacatcggcattgctccccacttaacggctcaggcctttaccagcggtccggccatggtcttcttcgtgatcagcggtttctttgccctgtttgcatacagtctgtggtataagggcaacagcatgtgcggcgcggcgctcggcatggcgtgcaacggggcattctccttctggggaccgtttttctgctggattatccttggcgttgtctgcggaatcgacggctggtcacttccgcccatcgtctgggcggcagcaattctgatgattttcggtattctcatgattgccatgaatccgctggatctgtttcggaaaaaggaggactagggagatgaaaccactgagctatgcgattatcaaacattttacaaaagttcccgaggcctgtgcggaagatgtgatcgacgcattaaagggagagtacggtaagtttaaggggctgacattaaaggctgttatcgagaccctgatgacggatgaagccaacggactcttggaggaatccagatttgaactggacgaagccgggaatttaaggatttactaccgggcgaatgaggagcagagggcgacgatcaaccggtatattaaagactgacggcgaaacataactcgatttgcctggggcagtaaagcctggaaggctgataactggaaaaagacggtgtgcatcccgccgatgggctgcatcccgtcttttttgactgtcctggtgcgcttgcttctgcctttccgcttaaagcggaagataaaccggtttcctcttgcggaacacggtataatacgagaatccgcattctttcagcagttcccttgtctgttcgaaatcggcccctaaatcttccgggatatgggcgtccgagccgatggtcaggatttctccgcctaactcccggtagcgtttcagcacatcagccgccgggttgggctggctgattcccttccgcagtccggccgtgttgcattcaatccccttgccgtgttcaatgacagccttaagaatcctgtcgaggatgtccctgtacgcttcatagctgtagaaggcggccttgttgggaccgtaacggacgatgtagtcgatgtgccccgccacgtcgtaatcatctaaatggctgacattctccagcgtagtctcaaaatactgaaggtaggcgctggcctcccctctctccttaaaaaactccgggtaggcgggatcctttctgtctatgaaatgagtggaaccgataacgaaatcaaagggatatctgcgggtcagttccttaaaatagtcctttaaatggacctgcagtcccagttctatcccgattctcacatcgatccggtctctgtattcttcctgaagactggcaagagaactcatgtaggggtccaaatccagtgtaaagtcaatgatggaatccacatcgtaatcgtggtggtctgtgatgcacagtgaatccattcccagctgtatggcgcgctcgatctgcgctctcgggggtgtcgtggagtcaccggaaaaatccgtgtgcagatggtaatctggcagcatgactgtctcctctctctgaatgaaaactaaacccattataatcaatatcgtagggaaaagcaacgcaggattcgtcagctttacacactttttaccaaaagtttacagaattcataaaaagcgttgaaaagatattcccgtctatgatatcattagaaatgtgcgcggcggagggagttcttttggtatgacgccggcgcctgataaaaagagataagaatgcaactgaaaaaggggttacaaggaggtaacaatgtctgtcaatgacatatcaagtctgttcagctttatcggtggactggggatgttcctgtatggtatgaacatcatggccgacggtatgcagaagaccgccggaagcaagatgagccagttcctgggaatgctgacaaacaaccgtctgatggcggttcttctgggtgcgctgatcacggctatcattcagagcagcggtgccacgacggttatggtggtggggtttgtaagtgccggggttctgaatctgacacaggcggtcggcgtaatcatgggtgccaatatcggtacgacgattacggcctggatcgtatccatgaaccagctgggggatgcgttcgccgtattccagccggctttttttgctccgctgttaatcgggatcggagcaattttcatgttatttggtaaaaagcagaagatgaaaacggcgggagagatcctggtcggccttggtcttttgtttattggtctggattttatgtctagttccatatcgccatacaccgacgcgcctgtattctcggaggcgttccgtctgctgggaagcaatccgattctcggaatgctcatcggtgctctggttacggctcttcttcagagctcctccgcctcggtcggtatcttacagactctggcgatgaacggtgtggttacaacaaacgcggcgattttcattacgctgggacagaatatcggttcctgtgtaacggccatgatatcgagtatcggcggttccagaaccgccaagagagcggcagtgatccatctgaccttcaatatgatgggagcggtgatcttcggagtgatttcgtttgtcctgttttccctgtatccgctgctggcggctcacaacatcacctcggtgcagatatcgattttccatacgatcttcaacctgacgaacacggcgcttctcttcccgtttgccaatcagctggtgaagctctccggtattttcgttccggaggataagaaggaaccggttgccacggacgaagagtctgagacgatgaagcatctggatgagagaatctttgaatcgcctgcctttgccctggagacggcggccatggaagtggtccatatggggcagatcaccatggaaaatgtcagaagagccatggacgcggttttgacaaagaatgcggatgaagtcgaagacgtgtataaaacggagcagaccatcaataatatggagaagatgctgacggaatatctggttaaggtcaacaatctgtctttgacggagcggcagaagctgatcgtcaatgacttattctacagcatcaatgacattgaacgcgtgggagaccatgcggaaaatctggctgagcaggcggaatacatggtacagcataatatcagcttttcggaaaccggtgagtcggatcttcatattatctgtgagaccgcttttaagtcctttcagcattccattgaggcccgccggaagggagatatggacgatgtcagaaaggtaagccagtacgaggatgaggtggacacgctggaggaggagctgagagaaaagcatattgagcggctgtctgccggcaaatgtgatccttcggcaggcgtggtgttcttagatctcatcagcaatctggagcgtatttctgaccacgcatacaatcttgccggatacgtgaaagacgagatgtagaacatgttaaaaaagtaacaaaatctaaaaaatgaaaaaaaggacttgctatttaatggattattaggtagaataaagggtagttgattttattttaacaaaatcacaggaaattcattatcctttacagatagtgggtttgtggttgaaaaagaacaatcaaattaattttattcttaggaggaattgaattatggcagtaaaagtagcgattaacggttttggtcgtatcggtcgtcttgcattcagacagatgtttggtgcagaaggttatgatgtagtagctatcaacgatttaacagatccgaagatgttagctcatttattaaaatatgacaccgctcagggtggatacacaggacgtatcggcgaaggccttcacacagtagaagcaggagaggactccattactgtagacggcaagaccatcaagatttacgcagaaaaagatgctgctaatcttccttggggagaaatcggcgtagatgtagtattagagtgtactggcttctactgctccaaagataaatctcaggcacacatcaatgctggcgctaagaaggttgttatctccgcaccagcaggcagcgatctgccaacgatcgtttacagcgtaaacgagaagacattaactgcagatgataccatcatctccgcagcttcctgtacaacaaactgcctggctcctatggctaaggctcttaacgattacgctccgatccagtccggtatcatgagcacaatccatgcttacacaggcgatcagatgatccttgacggaccgcacagaaaaggcgatttaagaagagcaagagctggcgctgccaacatcgttccgaactccacaggcgctgcaaaagcaatcggccttgttattccggaattaaacggcaagttaatcggttccgctcagcgtgttccggttccgacaggttccacaacaatcttagtagctgttgttaagggcaaagacgttacaaaagaaggcatcaacgcagctatgaaggcagcagcttccgaatccttcggctatgaagaagatccgatcgtttcttctgacgttatcggtatgagatacggttctctgttcgatgctactcagaccatggtttccagccttggtgatgacttatatcaggtacaggttgtttcctggtatgacaatgagaattcctatacaagccagatggttcgtacaattaagtacttcgctgaattaggctaatgatttaaagatccatggagggtccggtcgtttggaccggacccttttatcgttaaaaagaaggtgcgctccggcgcggtcttttacgtatagaaacaggtttgtatggtgtattcataaccattctgttatgaatacagcgtaaagtcaaaatatggaaaggagcatgaacatatgcttaacaagaaaacagttgacgatttaaccggattacagggaaagaaagtactcgtaagatgcgactttaacgtaccgttaaaggatggcgtgattcagaactacaaccgtatcgacggagcgattccgaccattaagaaattacttgatcagggcgcgaaagtaatcctttgctcccatttaggaaagccgaagggtgagccgcttccggagatgtccctggcaccggtagctcctgctctgagcgagagacttggcgtagaagtgaaattcgtggatgacccgaaggtaacaggaccagagacacagaaggttgctgctgaattaaaggatggcgaagtattattacttcagaatacccgttacagaatcgaagagacaaagtacggaaaagatgagaacgcagaaggctatgcgaaagaactggctgatctctgcgacggcattttcgttaacgatgcattcggtaccgctcacagagcccactgctccaacgtaggcgttaccaaatacaccacaaccaacgtagttggatacttaatggaaaaagaaatcaagttcttaggacaggctgtagaaaatccggttcgtccgttcgttgccatcttaggcggagcgaaggtttccgacaagatcaatgtaatcaacaacctgcttgacaaggtagataccctgatcatcggcggcggcatggcttataccttcgagaaggcgcagggcgaggagatcggcaattccttatgtgaggaagataagctggattacgctctggagatgattaagaaggctgaagaaaaaggcgtgaagttattacttccggttgaccatgtagaaggcagggagttctccaacgatacagagcgcaaagtcgtggatgtgatcgatgccggctggtcaggctttgatatcggaccgaagaccatcgctctttacaaggcggctttagaaggcgctaagactgttgtatggaacggaccgatgggtgtattcgaattctccaactttgcggaaggtactctggaagtatgccgcgccgttgctgacttacaggacgctaccaccgttatcggcggcggggattccgtgaatgccgtgaagagacttggcttcgctgacaagatgactcatatctccacaggaggcggcgcatccttagagttcctggaaggtaaagaactgccgggcgtagctgctgcagataacaggctgtaagcacggaacgaggttttcgagccttagtcgaacggaacatacaatgatttaaaggagaataaaataaaatggcaaggaaaaaaattattgctggcaactggaagatgaatatgacaccaacagaggcagtagaactggttaacaccttaaagccactggttgcgggtggagatgcagatgtagtattctgtgtaccggctatcgatatcattccggttgtggaagcggcaaagggaaccaacattttagttggcgccgagaatatgtactatgaggacaagggcgcctataccggcgagatatcccctgccatgttagtagacgcaggcgtaaaatacgtggttatcggccattctgagagaagagaatactttgctgagagtgacgagaccgtaaacaagaaggtattaaaggcctttgaatacggaatcacaccgattatatgctgtggagagtccttaactcagagagagcagggaatcaccatcgactggatccgtcagcagatcaagattgctttcttaaacgtaccggcagataaggcggcggcagcagttatcgcttatgagccgatctgggccatcggtaccggcaaggtcgctaccaccgagcaggcgcaggaagtatgcggcgcgatccgtgcatgcatcgctgaaatctatgatgaagctacggcagaagcgatccgtatccagtacggcggttctgtatccgccggaagcgctccggaactgtttgcacagccggacatcgacggaggcttagtaggcggagcttctctgaagccagacttcggaaagattgtttgctataacaaataagtaatgaataatacaggatcgtgaagaatcctgtaatgaaaagggtggggacagtcactggaggtggcgtctctgcctttttctttcctgaaatgtggcgggggtaatgcgcaatcagttgacaattcataagaaaacgtgaataatggtaatgaatataccgatacccggggggagagaatgggtaaagaaggagaacgtatggatacaaaagagccggaactgatgcagaagagtattgagatcgatatggaacggatccggaaggaactgtgtgaacaggaactgcttccgggagcgtattgtcaggagtacgagatatttaaagtgatttaccggtttatggcgcgaagactgagacgaacgaaggaggattgctatatcatccttctgactctgacggacaggaagggagaactgccctgtcttaagaaccgtggcggccagatggagcttttaagggaaatgatccagtattcgatccgctgtggagatgtatatacgaaatacagcagctgccagttcctgattatggtgacggatttatctgaaccggaggctgatatggttgcgaacagaattacggatgctttctaccagaagcttgggggagatgcggaccaggtgctgctgcaccattgctatcccttaaaagccgcagaaacaacggcagccggaagtgaaggctgaactgttagatatgacaaatatttgtcattcagcagttgcaagatatccgtaaatcatgtagaatatagagttgtgagaagataattaccattatatagaaaaaacaagataaggagattaagttatgagcaagaaaccagtagtacttatgatacttgatggatatggcctgaatgataactgtgaccacaatgcagtctgcgaaggcagaactccggttatggaccagctgatgagtcagtgcccgtttgtaaagggtaatgccagcggtcttgccgttggacttcccgacggacagatgggaaattccgaggttggccatttaaacatgggagccggccgcatcgtttatcaggaactgacaagaattacaaaatctatccaggacggcgatttctttgacgttcctgagtttttacaggctgtggagaactgtaagaagaatcattctgcccttcatttatggggactcgtctccgacggaggtgtacacagccacaatacccatatctacggactcttagaacttgccaaacgaaacggacttgacaaggtctatgtacactgcttcctggatggccgtgacacaccgcctgcatcaggcaagggctttgtggaagagctggaagcaaagatgaaggaaatcggagtgggaaaagtagcctccgtcatgggccgttattacgcgatggaccgtgataaccgctgggaccgcgtggaacgcgcgtacaatgccctgacaaagggagagggaaagactgctgtcagcgctgccgacgggattcaggcttcctatgacgcggaagtaaacgacgagttcgtggagccgtttgtcgtagtggaggatggaaagccggttgccgttgtaaacgatcatgattctgttattttcttcaatttccgcccggaccgtgcaagagagatcacgagagcattctgtgacgatgagtttaaaggctttgcaagagagaaacgcttagacttaacgtatgtatgctttaccgattacgatgatacgatcgcgaataagctggttgcatttaagaaggaatccattgtgaatacctttggccagtaccttgcggaccataatatgacccaggcgagaatcgccgagacagagaagtatgcccatgttactttcttcttcaacggcggagtggaggagccgaacaagggagaggacagaatcctggttccgtctccgaaggtggctacctacgatcttcagcctgagatgagcgcaccggctgtctgcgacaagctggtggaagcgatcaaatccggaaagtatgacgttatcatcatcaattttgccaacccggatatggttggccatacgggtattgaagatgcggcgatcaaagcgatcgagacggtggatgcctgcgtcggaagaacggtggacgctgtcaaggagacagacggcatcctgtttatctgtgcggaccacggaaacgccgagcagctggtagattatgagaccggcacaccgtttaccgcccataccacaaacccggttccgttcattttagtgaacgcagatccgtccttcaagctgcgtgaaggcggctgtctggcggatattgcacctacgttaattgagttaatgggcatggaacagccgaaagagatgactggaaagtcattattagtgaagtaaaatccgggaaatatcaggtaaaaacgacataaacataaaagaaaagtcatgatatgatctcaaatataaaaaaatagttatgaaaagtcgaaaaaggccgcatatctgaaccttatgaaccggagggattaccaatggggaggaaggaaccggggagcggtcttttgagaacaagggaaaggggaattgccatgttggacaaaaaagttgcagaactcattaacgtgcaggtgaataaggaattttactcggcgtatctgtatctcgattttgcaaattactaccgcgaggcagagctgaacggatttgcgaactggtatcaggtgcaggcacaggaggagagagaccatgcgatgctgttcatgcagtatctgcagaataacagcgggaaggtgactcttgaggcgatcgataaaccggataagcagtttgaggattttggcggtccgctgaaggccgggctggagcatgagatctatgtgaccgggctgatccatgcgatctatgatgcggcgtactctgtaaaggatttccgcaccatgcagtttctcgactggtttgtgaaggagcagggggaagaagagaagaacgccgataatctggtgaagcggttcgagctttttggacacgatccgaaggggctgtatatgctggattctgagatggcggcccgcgtatacaacgctccgtctctggtgctgtaatgggaaacagcctgcttgacaagtgcgcaaaagaaatctatactgaatatgcaagggtttctaaacaactcccttagcactaaaggaaagatgaatatgagaaaaccacttattattcaaacagattttggcactgcggacggagctgtctgcgcaatgtatggagtatcctatggggtagacccggaacttcgtattacggatttgacacatgagattccccagtatgatatctgggaagcatcctaccggctgatacagacggtgaactactggccggaaggctctgtattcgtcagcgtcgttgatccgggagtgggatccacgaggcggagcatcgtggcgaagaccaccacggggcagtacatagtgactcctgacaatgggactctgacccatgtgaagcggatgtgcggaatcacggaagcgagagtgatcgatgagaatgtgaaccgtctgccgggatcgggagagagctacaccttccatggccgtgatatttacgcgtataccggggcaagactggctgccggcgtcatcaccttcgagggagcaggcccttccgtggatgtggagagtgtgatcgagcttccggtggtggaagcggcttataacggcgacagagtgagcggtacgatcgacgtgctcgacgtcagatttggaagtctgtggaccaatatctccagagaactgtttttaaagcttggtgtgaagcacggccagcgtgtggaaatcagcatcgagaatgagacgagaaccctgtataagaacattctggtttatgcaaagagctttgccgacgtttatgtaggcgagcctctcatctatgtgaacagtctggactgtatggcggttgccatcaatcagggaagctttgcaaaggcatataacatcgggacagggaataagtggcagattacgatgcgtaaggcgcctaagattatatatgaagattaaaactgaacttgattcagtgacggaataaggaaacggctgtccgccgctccggaagaaggagcgtgcgtgcagccgttttttcgctttacgataccggtttagacggtgactgcgtatttgatgacgtggtcagcctgcttttcaaacacctcgtaagcctccataatatgtgccagatccgtccggtgggtgataagacagctggtatccagcctgccttcatcgatcagcttcataatttcaccgcaggaattggcgtcgacgcctccggtcttaaagatcagatttttcccgtacatgtcaggcagagggaggatctgcggttcctcatagagggcgacgacacagacaaccgcgtttggacgggcaatctgccaggcggtccggaaggtattctctcctccggcgacctccaaaacggagtcagcgccccggccggaggtgagctccagcactctttccagtatgggaccactgcttggatttaaggtgtaatcggcgagaccgcggctcctggccagatccagccgctcctcagaggtatcgatggcaatcagcttccccggatgatagaggcgggcgcacatcatggtgcataagccggtagggccggccccgataacggctaccgaatccccctccttaatgtccgccagtccggcgccccagtagcctgtggagagtatgtctcccgtaaaaagtgccgattcatcggtcacagaatcgggaatcggcgtgaggccgttgtctgcaaacggaatgcggacgtattcggcctgtcccccgtcgatgcggcagccgagagcccagcctccgtgctcatcggtgcagttattgacgtaaccgcgccggcagtaaaagcattctccgcaaaaggtctccacattgacagccactctgtctcccggttttacccgtgtcacctcacttccggcttcctccacgactcccacaaattcatgaccgagaatggtgccgggaacggctcttggaaccgccccgtgaagaatatggatatcactggaacagatggttgtgagcgtaacccttacgatggcgtctttggggctgatgatgtgaggaaccggccgttcttcgaaccgcaggattccattgccttcgtagacggcggctttcatggttttctttgtgtggtgattgtatgacatgacagttaccttcctttttttattgctttcattataggccatatgttccttaaatacaagaatcgaagtaccgtccgaaagactgaacaaaaaacaaaaggattcctccttaaactttgtagaaatatgttgacagaaggggttctctgtactaaacttaacttgttgaacaagttgaacgggaggtgcttatggttaagagatgtaccggggaagatgagagcagactgctggattttttggagaaagatgcggtctatcacacgtttctgcttgcggatatcaggaattacgggttcgatcaggagtttcagactgtgtatgcaggactggaggaagagagaattactcatgtttatctgaaattttacggaaacttaatcgtggcaggagatgcaaaaggcatcgacggggagtttttaaaaacactcaccgaagactggaagccggatgtggtcatgggaaaggcggagctgacgaaggcggccggccggtggcttccgggatatgagctggcggagaagaatctctatcttctggaggagggaacgcacctcatcgatgagaacggactgccggagggcgtgaccatgaaaaagggcgtgccgggagatgaggataagattcatggttttctcatgacgatcccggagatccgggcgctttatacttccaaagagatgatcgcggaccggctgaagagcggagacgggacccatctctatctggaacggaacggggagatcattgcccatgtaaacagtgcggcgcagagtccgtttaccgtgatgctgggcggggcggctgtgaaggaaacggagcggggaaagaattatgaggcgatgctggtcagccggatcagccgtgacattctggcagaggggaagaaaccgtgtcttttctgcgacagagagtcagagcataatttatttgtacatatcggttttataaaggcaggagcctggggaacgctgactccccggaaggcggaagagggaaagagcaggctgccgtcctacattcccgtctataaccggctgtttcaggatctgatggatggcgtatacgagaaggacagccttcttcccagtgaaaatgtgctggcagccgcctataaggtgagccgcaatacgctgagacaggcactcactatcctggcgcaggatggatttatctataaacggcaggggaagggaaccttcgtatcttacgactgccgcagaagggaaaagaagaacctgtataactttttaagggagtgtgccaaggaaccggtgagccgggtgaccatggattacaatatcgggcttccgaccaatatcgcaaaacagaaattacagcttaaaaacggggaagaggttcttgcgagcaataacgtatactggggcgaggaagggcccatcggccagtcctttctgcagattcccatggagctgatcacgggaagcggcatagacggaaaggaaccggacgaggaacagcttcttcattttatggacagtatgatttatcagaaggcggtgaaagcccacatgacgattcaggtggtggccgctgacgaacaggtgatctcctatatgaatatcccggagggaaccgtgcttcttcatatggaacagattttatacgggccggatttttcacccgccgcccggattaaatattatttcattcctgacaaatatcaggttgactgtcagctgcaggcataaccggtaaacaaggaggcatacatggatacgaataagaaaccaatgattcagttcaattcattccagtttcactatttcagccaggcggaaccgacccttcatgacattaatttgacgatctatgaaggggaaaaggttctcattgtcggccccagcggaagcggtaagagcaccctgggaaactgtttaaacggtctgatcccttttgcctataagggagagattgaaggaagccttaaaattaacggcagggagacgagggagatgaacatcttcgaactgtcgaaaatggtgggaaccgtgcttcaggacgcggatggccagttcatcgggctgacggtgggcgaggatatcgcgtttgccctggaaaacgactgtgtggaccagggaacgatgaaggaaaccgtccagagagtggcggacatggtggacatgggtaagcttttaaaatcttctccctttgagctgtccggaggacagaagcagcgagtatccttcgcaggagttatggtggatgacgtggatatcctgctgtttgacgagccgctggccaatttggacccggccacgggtaagacggctatcgatctgattgaccatgtgtggaaggaactgggaaagacggtggtgattatcgagcaccgtctggaggatgtgctttaccgtgatgtagaccggatcgtggtggtcaatgatggaaggattgcagcagatatgacgccggacgagctgatcgcggcggatatccttccgggaatgggaatccgtgaacccctctatgccacggcgctgaaatacgcgggagtcagtgtgacgccggagatgcgaccgggccgtatggaaacgctacgtatagagatggtaaaggaggcagtacagaaatgggccttgagccgcgtaccggaccgggaggtcaacgacaggccggacattctgacggcggagcatgtaagcttccagtatacgaagaagcgcagaatcttaaaggatttaagcttccatatccgggaaggggagatggtcagcatcgtaggcaccaacggcgcgggaaagagcaccctggccaaggtcatctgcggatttgttacggaggatgaggggcgtcttctgtatgaaggggaggatttaaagggaaaaacgatcaaagagcgttcccggatgatcggtttcgtcatgcagaaccccaaccagatgatctgtaagcccatgatctacgatgaagtggcgctgggactgaggattcgcggtgtggatgaggcggagatcgataaacgtgtggaaaaggcgttaaagatctgcggcctggctccgtttaaaaagtggcctatctccgcgctgagctttggccagaagaagcgcgttaccatcgcctccgccctggttctggatccgaagattctgattctggatgagcctacggccgggcaggatttccaccactatacggagatcatggagtttttaaagagcttaaacagcgagggggtcaccatcattatgatcacccacgacatgcatctgatgctggagtatacgcctcacgccatagtcattgctgacggggagaagatcggggacgctacctcagcggagattctgaccaacgaatcgataacggagagggcgaatttaaagattacctccctctatgagctggctgtggaatgcggagtagaggatccggagggctttgttcagaacttcatcgattacgaaagggggcttcgccacgtatgaaaagcaaattgttcgactacatagaccgggataattttatctttaatttatcgggacttaccaagctggtatgtttcatcggtttgacctttgcggtcatgttttcctacgatatccgctatatcctgtttgtcatggtactgtccgtcatctttttcgccatgtcgggcctgcagtttaagcagatcaggctgatgacgatatacgtggtcatctttctttctgtcaacttcgtgctgacctatatcttcagcccgcagtatggtacggaaatatacggtacgtctcacgaactgtttcggattaacagccgctatattgtaacggaagagcagctgctctatcaggtgacgaaggtgacgaaatacgcttccgtggtccctctgggaatgatcttcctgctgaccaccaatcccagcgagtttgcggcttccattaaccgtgtgggctgtaattacaaggcggcctacgcgctgtccttaacgctccggtatttccccgacaccatccggaattaccaggatatcgcgctggcacagcagagcagagggctggatttatcgaagaaggagaagctggggacgagagtgaagaatgtgatgaacatctgcgtgcccctgatattttccacgttggaccggattgaactgatcagcaatgccatggacttacgcggctttggcaagaagaaaaagcgtacgtggtatgtggcaaagccgttaaagaccggggactggtgtgcgatggcggtggcgcttgtgattttcctgggctctctgtgcatgacgttttttgtcaacggaggctccaggttctataacccgttcatttaaaatttattataataaaggagaaaagctatgaaaccaattttagtatttcagaccgattttacttacaaagaaggcgcagtcagctccatgtatggggtcgtaaagtgtgtggaccgggaactggagatcatggatggcacgcatgagcttccgcagtttgacacctggagcgccagctaccgtttgtatcagagccttcagttctggccggaaggaaccgtatacgtgtctgttgttgatccgggagtaggaaccaggcgccgtgcctgtgtggcaaagactgttgacggttactatatcgtaaccccggataatggttctttgacgcatgtgaagaagatgatcgggatcgaggcggtgcgtgagatcgacgagacggtcaaccgtctgagaggaaaaggaacggaaggcgtcgccatcttccacggccgcgacttatttggatatacggctgcccgtctggccagcggaatcatcgatttcgagggggtaggtccggaatacccggtggaggagatcgtggagcacccgatcctggagccggagattaccgaaggaaaggcttgcggcgtattcgagatcaacgatcccaactttgggaacttatggacgaacatccagctggaagactttaaccgcgcgggatttgcctatggtgactacgtgaacgtgacagtgaagcatgaaggagaggttgctttccagcagaaggtattattccaccagagctttggtttcgctttaaagggcgatccgatgatttataataatgagctcatgaaggtgtctctggccgtcagccagggaagcttctgtgagaagtacggtctgggttacggaccggaatggacggttgagtttacaaaatagcttgacaaattatgggaatttgagtagtcttaactcgtaatctaccaaccaaaggagggtaatcatgaaaaagttatttgagttcaaaacaaagaccatcgttgcaacgggacttggcgcggctttattcactctgctgtttatgtatgtgaagattccgaccggaattccggaaaccgacatccagaccgcatacggcatcggcgcatttttcgccgctctgttcgggccgatcgcgggcgggctgattgcattcatcggacatgcgctgtccgactccattcagtacggttctgcatggtggagctgggtggttgccagcggcctttcctgctttataatcggtcttgtatatccgaagcttcatgtggaagacggtgagtttggcaagaaggatatcattcttttcaacgtttaccagatcattggcaatgccattgcatggattattgttgctccgattctggacatcctgatctatgcggagccggcaaacctggtatttacacagggcgtcgtagctgccatcagcaatgcgatttcctcaggcgtcatcggtaccatcctgctggtgctttacagcaggacacgttccaagaagggcagcctgacaaaggaataaatcagtataaaagggccgccgtctgcaggcaatctctgcaggcggcggcctcttttataaccgcgcacatggttttttcgcggctttgggtgtggagccgtgcctattactcatcaaacagtttggaatagatctcttcacacagtgcatccacataagcctggtccggaaggtcttttgaggtaaccaggagatcagaaatcagctcgaaccgctttagattcctctcatcctcgcttaagtcagaaaagtcggcatcgagccgtccgtcaatgtcctctctccggtaggcggaaagaaaccaggagatcagttcctccgtctgcttttcctccgcctcaatgtcgccggccatggcttttgcagagcggaatgtcatgacggcgatgatcagacagccgattcccataacggtcagcgttccctgaatcaggtatttggaaaagcctgtcatcggcatgtcgaaaatgcctgcccagcacagaagcgcaaagatggtgatagctcctcctaccagtaaaaatgcggaggcgctggatttgcggtcttcgtatttctgggattttttcacgtaggcagcggggggacgcgccggtttttcctgcctgggaagctctccggattcttctgcggaggcctcttcttttaggtactccggcggcagagcgtccggttcaccgggctgcgatgtgttctgcacggcgagggcctcctcctttgactcgaacagagggccgccgcagtcggaacagacggtaactcctttgataaattccatgtcacatttgggacagtatggcatgacgttctcctttgcatatggtaatatagttaaattatacctcttaatcctctgttcgtctatgaagatttgcaaatagaaaaaagtaaggtcgttttatacttccctttctgagcaaaatacgatagaatagagaaagacatattaggaagggtttcagatgagtattaggatcaggtttgcattaaggccaaagaaccggctgaccggcagccgtgaatggacgccggaggccgcggagacgatgattaaggaactggccggagagcagggatatacatgcgagtctctatccggatgtctgctttgcaggttttgtccagagggctatatatggttccactgggataaacggatcctgcggggggagtcccagaccaacatcgtggggcccggctttcatgtggctgtcatcgaattcttagagcagctggccgggcggggaaaattaaaattaaaggttgacgataagacgggctattactggaaacgggattttctgaccatgcggagaaagtatttctatcagtggtttatggatctgatgaagctggtttccgattgggagaatgggccggaatatacattctgctggccatccagctactatataccggaaaaacaggagggaaagctgatcacacatatccgtcctttttcgtttacggaaatccgcggggtcgtgaactccggactgagcatggcatttgccagggatttttttatttggagtgagattgaaaaggatgctgtttactacagaaactgcgcactggtgcttttaaatcagagctgtttttttatgccatccagccggagcgaggcagacaggaaggtgaatgacgggattatatactgtctggagaaggcgctttccatggattccggcctgcagtttcccgtgaaagagtatctggagatatgccgtctggcggagcatgaaccggtggatgtgagccatgtggacccgctctcgggcgagctgtttgtgggctgcagaagacagctcatttaccggaagctgggcaatatgaaattctgcctgcccgggtccttcctgttcgatgaaaactgccgcaacggcatggaccactactacgacggtgtgggatacggaggtcatgacctctatatttatgcggtagtcctgggaacaggcggcacttccagatttaaaaaagcatggttcgaacaggggacgccggagcaggagtttctgtttgatgcagataaaggcaagggtaaggctgtcttctacgcgccggaggagaaggacggagaggtgctttacaatatgtccgcccaggttctctacaaagaacagaggacgaatatcaatataacctgcaggaagcccggtgagacggagtgggctcttgatctggtaaaaaggattacaatatcggaatagagaattacaggatcagaatagaggagtttatggaacagaaagagatgaaaacgggagcgctcttaaaacggttcgttccttattataagaaatacgttcggattatggtgtttgatctgctgtgcgcctcgctgaccacggtctgcgagctggtactgcccctgattctgcgctatatcaccaatcagggcctgaaggatctggcctcactgaccgttcagacgatcgtgggaatcggagtgctctacttcgccctcaggattgtcgacggtctggccagcttctacatggcgtacaccggtcatgtgatgggggcggccattgagacggatatgcgccaggatgcgtttgaacatctgcagaagctgtccgataattacttcaataatacgaaggtgggacagattatgtccaggatcaccagcgatttattcgatgtgacggagtttgcccaccattgcccggaagagttttttatcgcctttttgaagactgcagtgtcctttgtcattctggcggggatcaaccttccgctgacagtgattatctttgtgttcatccctgtgatggcagtctcctgctcgtactttaacattcaggtaaagagggcgttcaagaagcagcgcaaccatatcggtgaactgaacgccaggatcgaggacagcctgctcggcaacaaggtggtacgcgcctttgccaatgagggcgtcgagattgagaaattcaacagggataatcaggaatttttaaatatcaagcgccagacctataagtatatggcggcattccagaatacgatccgcatgtttgacggactgatgtatgtggttgttatcgttgcgggcggtatttttatgattaaagggcttatcgatcccggagatttagtggcctataccatgtatgtgactacgcttctggcgacaatccgcagaattatcgaatttgcggagcagttccagagaggaatgacgggaatcgagcgctttacggagctgatggacgcgtctgtggatatttttgacgaggagggggcggttcccctgcgggatgtacatggaagcattacgttcgagcatgtatccttcgaatatccggatgaccataatcctgtcctttccggcattgatttaaagatcagaccgggggagaaggttgccctggtggggccgtctggcggcggaaagacaaccctgtgtaatctgattccacgtttttacgatcctaccgagggacggatccttctggatgggcaggatatcaggaatgtaacgctgcagagtcttcgcggaagcgtgggtgtggtgcagcaggatgtttatttgttctcgggcacggtttatgagaacattgaatacggtcatcccggcgccaccagggaagaggtccttgaggcggcgaagatggcgggggcccatgaatttattatgggcctgaaggacggctacgacacgtatgtgggcgaacgcggtgtgaagctctccggcggccagaagcagcggatcagcatagcaagggtatttttaaagaatccgcctgtcctcattctggatgaggcgacttctgccctggataatgagagcgagcatctggtatcgcagtctctggaacgtctggcgtcaggccggacaacccttacgattgcgcacagactgacaaccatccggaatgcggacagaattcttgtcctgtccggaagtaatattatagaagaaggaaatcatgaggaactgattgagaaacagggaatctattaccagctgtacacctcggcaggcgaggcggagcaggaaagcaagatggaaatgaaggagaatagcagatgagagtagcgattgttacggacagtaacagcggaattacgcaggagcagggaagagaagcgggaatttatgtggttccgatgccgtttatgatggcgggagagacgtattttgaagacatcagtctgacgcagaagtcattttacgagaaactggcggaaggagcggaaatctccacatcgcagccgtctcccgcgtctctgattgagttgtggaacgggctcttaaaggatcacgatgcggtgattcatatccccatgtccagcggtttaagcagttcctgtgagaccgcccacgcgctggccgctgattttggcggaaaggtgctggtggtcaataatcagaggatttccgttacacagcggcagtccgttctcgaggccaaggccatggcagatcagggcatgagtgcggaagagatcaagcgggtgctggaggagacggccctcgattccaccatttacattactgtggacaccctggaatatttgaaaaagggcggcaggattacgccggctgcggcactgttaggaacatttttgaagattaagccggttctcacgattcagggggaaaaactggatgcgtttgccaaggcgagaaccatgaagcaggcgaaaagtatgatgattacggcggtaaagaaggatctggaggagcgtttttccgatccggaaggagccggtgtccacatggctgtggctcacacggataatgagacggcagctttagaatttaagaaggagctgatggagctgtttccgaaggccggcgatatctatgtggatcacttatccttaagcgtgtcctgccacatcgggccgggggcgctggcagttgcctgtacgaagaagctgtctctatgagcaaaacggaccgggaggtgtggttaagatgttcttccaggtgaaaccgattaaactgaaacacaccgtaagcttaagactggtgctgatcctgtttttcctgatcatcggtctggctcccatgatgattcagaacaagatcatgctgggtacctaccggcagaaccagatcgatgcgcggattcaggatattcagaaccagtgctcgattctgagcaataagatgacgcggggcggctacctggtgaatgagcccagggatacgctgctggacaatgagatgtccgtgaaagcagacatgttcaacggcaggatcgtcatcgtcaataagaatttcaggattgtctctgataccttttcactgtcgctgggcaagctgaacgtatcggaggaggtaatccggtgcttcaacggagaaaacagcagcaagtataattcagacaaaaattacgcggcgctgacgatcccggtttattccaacagtgaagacaaggtcatcgacggcgtcatgattgtgacggcgtccaccgaagatctgctgaccaggctgtcttctgtgtcggagaagggaagcttcctgcacctgatgatcttttccatgctggcgattatcgtcgtgcttctcgtcaagtttctgatgaatccgttcaaggaactgcagtggaagctgaaacgggtggaggaaggcaatctggatgaggaactctcttccaacgcctatacggagacgcggcagatcacggaatctatcagcaagacgctgaaaaagctgaaggcggtagaccagtcgagggaagaattcgtatcgaatgtgtctcatgagctgaaaacgcccattacctcgatccgcgttcttgcggattccctgatgagcatggatgacgtgccggtggagctgtaccgggaatttatgacggatatctcggacgagattgaccgggagagcaagatcatcgatgacctgctggctctggttcgcatggacaagacggcaggaacggagttaaacatcgcccaggtgaatgtaaacggccttctggagctgattttaaagaggctccgccccattgccgggaaacgcaatgtggagctgacctttgaaagcatccgggaggtgacggcggatgtcgatgaggtaaagctgtccctggcgctcaacaatctggtggaaaatgcgattaaatataacgtggaaggcggctgggtgcgtgtcacgctcgatgcggatcataagtttttctacgtcaaggtggcagattccggaataggcatatcggaagaatttcaggagcatatatttgaaagattttaccgtgtggacaaggcgcgttcccgggaaacgggcggtaccggtctggggcttgccattacaaagaatattattctgatgcaccagggcgcgatcaggctttccagcaaagagggcgaggggaccacatttacggtgagaattccgctcacctatattccatagaaacaggaggacgaatttatgaaacgatggatatacagtctgctcctcctggtacttctggccggtctggcgggctgtcagagaagaagcggggacggcggggacacggagggcgtgtaccagatctattatatgaattcctccatgacgcggctggagccgcaggactatacgatgccgcagatgcctgcggatggaacggccacggagacggactggaagatcacacagcttatggaacagcttaggaatgtgccgaaggatctggaccgccagtcggcggtaccggataaagtgggatttgaacggtacaagctggaggacacggtactctatctctattttgacaacaactatgccatgatgaacccgacgagggagattttatgcagagctgcgctcgtgcggacgctgacccaggcggagggcgtggactatgtggccatctatacggcggagcagcctttgatggacagcaccggcgtaccggtaggcgcgatgaccggggccgattttatcgataatatcagcaatgtcaatgcatttgaaaagacggagctgaccctgtattttgcagacagcaccggagaaaagctggtgaaggagcagcgggaggtggtgcataacgtgaccacttcactggaaaagctggtagtggaacagctgattgccgggcctgacaggccgggaattaacgcgacgcttccgaaggatacgaagcttctgaatgtgtcggtcaatgaaaacgtctgctacctgaattttgatgcgtcatttttaaacaattcgctggatgtcaaggagtacataccggtctattccattgtgaattcactggctgccgtttcctctgtcaataaggtgcagatcgcggtcaatggttcccaggatgtgatgttccgggattccatctccttaaaccagctgtttgaacgaaatttggattacaatgcggagaatgaagagaatccgcagtaaacagccgtaagtgctcataacgaggaggaaacaatttatcaaacgtccattatgtctgacagcagggggattcgtacttggagagaccgtcgttctgctttctctgacatcagggctcatggtcccggcgcttctggcggcgggagcaggcagtgcatgcctgtttggggtctggaatggattccgcaacggatcggagcatggattttcatgtgaaaggaggagcagaggcgccgtgtggctgtctgtgttcctcctttttatgctgattgggatggcgagagccggatatacgaaacaggagtgggaggcgcgcgaccggctgtgcggggagctggccgggacttatgtggaactgacagggcacgtgggtgcggtggaagaggcagagggaacggtacagctcacgctggagggaaatgatgtgcggcctgcggcaggagagaggaaggaagccgctttagccggaggggaccggtctgtgagcggagggcggcagattccacgcgttctggtatcgtggaagacggacggcgacggagagatgccggaggcccgggagttcaaggctggcagcaaagttacggtaagaggacagctggcgctgtttgcccgcgccaggaacccgggtgaattcgattccaggaactattaccggggggagggggtggactgccgcctgtacggggaagaggtggagcgttccggcggtgacgtctctccgattccggaatgtctgcggagaattcgggaaaaggcgaagcagaatatcaaaagatccgtgccggaagaagacgcggggatctttttggccgcagttctcggggataagaaggcgctggacagtgagaaaaaggatttataccagaagaacgggatcgcccatctgctggccatcagcgggcttcatctttcactgatcggaatgggcgtctacaggctgcttcgcaaagccggactggggtataaaggggccggactggccggggctgggtttatcttctgttacggtgcgatgacgggtggatcgccctccgtgacccgggctgtcatcatgatggggaccggattcctggcctcatatctgggacggacttacgatcttctgtctgcgctgtccctggcgctactgcttctggcatgggagacgcctgaacttctgacgcagggaggcgttcagatgtcgttcggcgcggtctttgccgtgggcagcgtccttccggtgattcaaaattatctgggaaagaaacggggcgctctgggggcgctgtcggtgagcgctgcgatccagctggtgactcttccggtcatcctgtgggatttctttcagctgcctgtctatgggatttttctgaatctgctggtgattcctctgatgggaggtgtcgtctgctccgggatcggagcggctctgtttggagggatttccggtgaagcgggagctgtggcagcgggggcaggccactgcatcctgcggttttacgagtggctctgccatggtgcggaacgccttccgtatcatacgctggtgatgggaagaccggaggcagcggctgtgattgtctattatacggtgctggcggccatactggctgcgatgaggagagcaggagggaaaagcgcatccggagagacggggaggaagaaccgcagagcagacggaaacagatggattagaaccgctgtattttttttgatctgcatcctgctcccctgtatactgatgccgcgccccgtggacggaatggaggttctgtttctggatgtgggacagggggacgggatcctgcttcgttccggccgcagcgcagttttaatcgacggaggcagcacctcagagaagaagctgggagagtatcgtctggagccgtgtctgaagagctgcggtgtatcggtgattgagtatgcctttgtcagtcatggcgatctggaccatataagcggcatccgctacttactggagtcctgtgaagaaatagaagtgcgcaatctgcttcttccctgtcagggacaggaggatgaggcgctgtctgatctcgctgagctggcaagggcgcgggggacccgggtggccttcctggaagcgggagaacactttcttgtggaggggattgggatcacgtgcctctatccgggaatccatgatatccccgcggataagaatgaggaatcggaggtgctgaaggtggattatggaaactgccatattctgtttacgggagatatgagcggggacggagagctgcggctgctggacgccctgtcagaaaggacaggagtgctttctgagattcagattctgaaaaccgcccatcacggttcccgtttttcttccggagcggaatttttagacgcgatgggcgtcaggtgggcagtgatttcctacggggagaggaattcctatggacatccgcatcaggaggtactggaccgtttccatgagcggggagtgaagatctatgaaacggcaaaagggggagcagttacgctgaaaacagatgggaaaatggtgcgctggaaggcgtttttgctcgttgacgcattcaaaatccattagtataatagtatcagtgacgaaaagcaggcagaaagggaagacatcatgcagaatctcactcaggatattaaaaatcacagcttcaaaccggtgtatttgctgtacggagatgaagcatttttaaaaaacagctataaaaatcagctgaaaaacgcgatatcaggcgatgataccatgaattataattatttcgagggaaaggggctggatttgaacgagctcatcagcctcgcagacacgatgccgtttttctccgaaaaacgtctgatcatggtggaagacagtggattcttcaagggagcgtcagacgaacttgtcgcctatttaccccagatgccggatacgacctgcatgatttttgtggaatctgaagtggacaagcgcagccgcatgtttaagaaggtgaaggaaatcggctatgcggcggagatggccagacaggattttgcacagctttccagatgggcaggagggattctggccagagaggggaagaagattaccgggcgaaccatggaactcttcttaaatatgaccggagatgacatggaaaatatccggatggaactggagaagctggtaagctttactctgggccgtgagatcatcacggatgaggatgtggaggcagtctgtacggttcgggtgaccaacaagattttcgatatggtgacggctatcgtgaaccgccagacgaaaaaagccatggatttatatgaggacctcctgacactcaaggaaccacccatgagaattctgtttctgatagccagacagtttaatcagattctgcaggtaaaggaactgatggcaaagggaatggacaaagggtcaatcgcctccaggatcaaggtgccgccgtttgtggctggcaagatgatgcctcaggcgaagacatttaccagggagcagatcctttcctgcgtgacgcagtgcgtggaagcggaagaagcggtgaagaccggccggctgaatgaccggatggcggttgaactgctgattacaaggcagttttgaaaaagactgtgtaaacggatcgcaggaagggctgtacggaatgaaaaggaaggaagataccgttggtgacggtgatcttccttcctttgttatatcaggcgcgaaacgttactccatctgaaaacatgccagataacgccggcctgcctgctcccagtttattacgcggaataaatcttcgatatagtctgctctgacgttatagtgctttaaatagtatgcgtgctcccagacatcgatatttaagacaggacacaatcccagtggaagcggagtatcctgattcccggtggtggttatcataagggaaccgtctgcggcgacaaccagccaggcgtatccggaaccgaaaacggataatgcggcctccttcagcttcttgaaaaaggcatcagggcttccgaagtcactgcggatggcatcggacagagcgccggatggcccttgagtgcccgatgcgggggccaggccggcaaagtagagcagatggttgtaaactccgccgccgttatttcgaaccgctgtctgaatggcctccggaaggctggcaatattatagagaagctgttccagtgtccagctgtgaaaacgggaatcatcggccagcgccctgttcagattatcaatgtaagtctgaagatggcggtcgtgatggagcttcatggttttttcatcgatataaggctccagcgcctgataagcatatggcagtgggggattggtaaatggataatgataagtaagatcagtcaaggggaatttccttatgcgctttttttatcatatgcaggcgggaagaacgccgtgagaagtgaagttcatttttaaagggcggaggaggagaaggataacctccgcccctggggggatgagctgcaaaatacaactcactataataacgtatcttgttcgcgtttgtgatgcaatattttgaaatgaacaatatgtttcaaaattagagcaagaatgtgataaaatatgtgaaatcctttcttaagtcccggaaaccagaggcgcctctgataagcaaaaaaatcccgtccagtgggttaagctgaacgggattccgaatttgtattatcgtcgtctataaattaagccattgcgttaacagccttagagatacgggatacttttctggaagcagtattcttatgatatactcccttagtagcagccttatcgatctcagcgattgcgcttgttaaacatgcctgtgcagcagccttgtcaccggcagtaacagcagcctcaaccttcttaatcgatgttttcactctggatctgatcgctttgtttctagcagccttagtctcgttaactaaaattctttttttcgcggatttaatgttagccaaatctgtacacctccaatttaaatgatatatggttattctttgttttgcatcaaagcctggacacggacagttcaatgtaaacataccttagtattttaacgaataaagcttccaatgtcaatacataattcctgaatttttgcagaaaataccagagaacagaaagaaaacggcggttcacggctttgcaggcaccggacatccggccggacgagaccagacagcaggtgcggcggcaccgtgaactataatgaaaggtgagaaatatggaaaatacatttggggtgcggacagaccttgcggtagaagaaacggaaagttttccgggaaacggcggagagatcagcggggtatctctgagagaatggcaccgtgccggcagccggatcaagatgacggaagtgaagatactggataaaaagggcgaaaaggccatgggcaaaccgatggggtcctatattacactggaggccgatcagttgtccagaaaggacgaagattaccacagagaggtgtcggaggaactggcacggcagatcgggaggctgctggaaggaaaaaattacagaagctccagctaccacgttctggccgtcggtctgggcaacagctcggtgacgccggattccctggggccaagagtgcttcataatctgcaggttacgaggcatttgaaggtgcagtacggcgatgagttctggagtggacgcagcatgccggttatcagcggtattgttccgggggtcatggctcagaccgggatggaaagcgccgagatcttaaagggaattatccatgagacgaagccggatctgatcatcgcaatcgacgccctggcggcaagaagcgtaaaacgtctgggaactaccattcagctgaccgatacggggatccacccgggttccggcgtcggtaaccaccgccacagcctgacagaggaaagcctgggggttccggtcatggccatcggtgttcctacggtggttggcgcggcagccatcgtgcacgatacggtatcagccatgatcggagccctgtcaaagagtatggagacaaaagggatgggggattttgtgggaagcatgagctccgacgagcagtatgacctgatccgggaactgctggagccggaattcggccccctttatgtgacgccgccggatattgatgagacggtaaaacagttgagctataccatttccgagggaatccatctcgcttttatgggagaggaagaggagtaaggggtaaacggtgattttcctgcatagtatataagcgagggacttttttctttccggggcgccgtgaaagaaatgcaggaaggtgtttatgaaggagaagggcggaaggattaactggctcatcagacatatgatgcttataaccggcctggtacttgccgtcctcctcctgatcaggggagcggcgggaaccgggctggcggagagcagggaacggcttacagccctgttaagcggccaggccgatgccgggctggaatggatctggcgtatgaattatccggcagcaggacacaatgacgaacgtgagacagaggcggggaaggcggaagaagaaagcatcagtggttttatctgccggttgattttcgggcagtcaccgctgtaccggtatctgggaagggaagaggatggcgaacgtaactacagggaagaggatccggcatttgccggatatctggaaagcggaaaattctatgaagagcaccagtatctgatgtatgacggcggagaagagaccggagccggtaccatggagcaggcaggcacgacggtgctggctgcaggcggcaatggagcagacggaaacaccggcggacagggaaccgtggcaggcgggaatgcagaaaatggcgcaatggcgggatcaccggcttcagaggccggtgctgcaggcggcagcgccgatgcaaacgcggcaggcattccgcaaaaaaacgagaatatgacgtgtgcggccagtgttctgccgctcataggaaccacatacagaaaagaacagctggctgactacgactatatgatgaaacatttctacagcgtgcatacctcgacgaccgcggggcgtgatctgatgaaggcggatgaatttctggctaaggattttaccctggaaggaaggaatgataaaccgcagattttaatttaccatacccattctcaggaggaattttccgattatggacctaataataaggaagcaaccgtaatcgggatcggaacttatttgacggagctcttaacggcaaaggggtacaatgtgatccatgacaaatcggtctacgatctccagaacgggaagctggaccggaataaagcgtatacatatgccctggatggggtcacgaggattcttcaggagaatccttccatcgaggtcatcctggatctgcaccgggatggggtcaatgaaagccttcacatggtcaatgaagtgaatggaaagccgacagctcccattatgtttttcaacggcgtcagccagactcccgagggaccgattgagtatctgccgaatccgtaccggagtgacaatctggccttcagctttcagatgcagttagatgcggcagcctattttccgggcctgaccaggaaaatatatattaaggggctccgttataacctccatctccgtccgaggtccgtgctgattgaggtcggtgcacagacaaatacttaccaggaagcgcgaaatgccatggagccgctggcggaagttctgaatatggtgttgcaagggaattaaaaaaatggtatatttttaaagcaggaacatcattgctgtgtcattttgtatttgtatcatcaactgcagaaaaatggaaaagaggaaagcaaatggcaactgttgaccagagtaaaattcgcaatttttgcattatcgcccatattgatcatgggaagtcaacccttgcggacagaatcatagagaagaccggtcttttaaccagccgtgaaatgcaggcccaggttttagacaacatggatttggagcgggaacgcgggatcaccattaaggcccagaccgtccgtaccgtatacaaggccgaagatggagaagaatatattttcaatatgatcgatacgccgggccatgtagattttaactatgaggtgtcccggagtctggcggcctgtgacggcgctgtgcttgtggtggattcctctcagggaattgaagcccagacgctggccaatgtctatctggcgctggatcatgatctggacgtatttcccgtactgaataagatcgatttgccaagtgcggagccggaacgtgtggtgggagagattgaggacgtcatcggaatcgaagcccatgacgcaccgaggatctcggctaagaccggcgagaatattgaggcggttttagaggcgatcgtgaagaagattccggcgccgaagggagatgcggatgcgccgcttcaggcgttgatcttcgactccctgtatgattcttacaaaggggtaatcgtattctgccgtatcatggaaggccgtgtgaaaaagggagtaaggatccgcatgatggcgaccggagcggtggaagaggtggtggaagtcgggtatttcggcgcgggccagtttatcccatgcgacgaactgaccgcgggtatggttggttacgtgacagccagtatcaagaacgtgaaggataccgctgtgggcgatacgattacggatgcggacaatccctgtgataaaccgcttccggggtataagaaagtcacctccatggtgtactgcggtatgtatccggcggacggcgccagatacaacgatttgcgggacgcgctggagaagcttcagctgaatgacgcttccctgttcttcgagccggagacgtctctggcgctgggcttcggcttccggtgcggttttctgggacttctgcatctggaggtcattcaggaacgtctggagcgggagtataacctggatctggtaaccacggcccccagtgttatttaccgggtttataagaagaacggtgagatgattcagctgacgaatccgtcgaacctcccggatccgtcggaaatcgagtatatggaagagcctatcgtgagcgcggaaatcatggtgaccaccgagtttgtgggagcgattatgaagctgtgccaggagaggcgcggcgtctatctcggaatggaatatatggaggcaacccgcgcacttttgaagtacgagcttcctctcaatgagattatctatgatttctttgacgcattgaagtcgcgttccagaggctacgcctccttcgactatgacttaaagggatatgagcgttccgaactggtgaagctggatattctggttaataaagaagaagtggacgcactgtctttcattgtacatgcggaatccgcttacgaccggggacgcaggatgtgtgaaaagctgaaggaggagattccgagacagctgttcgagattcccatccaggcggccgtaggaggaaagatcattgcaagagaaaccgtcaaggccatgcgcaaggatgttcttgccaagtgttacggcggtgatataacccgtaagaaaaaactccttgaaaagcagaaggaaggtaaaaaacgtatgcgccagattggtaacgtagagataccacagaaggcatttatgagcgtactgaagttagatgatgaataaaaagaaattggaaatctatgtgcacattcctttctgtgcaaagaaatgcgcctattgcgattttctgtcgtttccgggtaacatgcggatgcgccgggagtatacggacaagctgctggaagagatacgaattcagagcagctttgtccgggagtatcagattgataccattttcctgggagggggtacgccttccatcctggatgccgctgatattacggccatcatgggggctctgaaggagcactatgacattgcacccgatgcagaggtcacgatcgaggtcaatccgggtacggtgaagatggaaggcctggctgcctaccgggaagccggaatcaaccgtgtcagcatggggcttcagtcggcagatgacacggaactccgttatctgggcaggattcacacctatgacgagtttttaaagagcttccagagggtgcgcatggcgggatttacgaatgtcaacgtggatctgatctccgccattccggggcagactccggagtcctggaggaatacgctgaagaagacggccatgctgaagccggagcatatatccgcctacagcctgatcgtggaggaaggaacgccgtattacgaccgttacggcggccatgtggagatggaaggctatgagatgtctccggaggaacgccgaatcttaatggcgcttccggatcttccggatgaggacacggaacgggaaatgtattacatgaccaggaactgtctgggtgagcagggatatgaacggtatgagatatccaattatgccagaccgggcttcgaatgccgccataatgtgggatactggaccggaaccggatatctgggactgggactgggcgcttcctcctatctggagggctgccgtttccataatacgtccgatttccagagctacgtatcggcccatttcgacgacaaagcggaattcaatcagacgctgcgacaggattttgagcagctgagcgtaaagtccaagatggaagagttcatgtttctgggactccgcctgacccggggtgtatcggcagaaggctttattacccggttcggacagagcatacgcaatgtctacggcggtgtgattgacaagctggagcgtgagggccttctggaacataaaaatggctattaccgtctgacggagcgcggactcgatttgagtaattatgcgatgagtttgtttttgctggattgacggaggcggatttcgtgccggccggaaggaacgatcaggagaattgaaaacccgctgtcagaattggatctgttccaaatctgacagcgggtttaattattttggctgactgcccgttttactgaaccaggaatacctctgcacttctggtaccataggccctcgtctccccatgggtattaaagaagatatcgatgtggtttcccttaaccgcaccgccgcggtcctctgcggtatagatcacgccgttaatcatgaccttacttccgtaaggaatgactctcgggtcaaccgcgatggtatgattggcggaggcgatggctcccgtactggtatggcgtccccagccctccgaacagatggaacatgggcagtagccggtagttttaaagacaccgagggaacggagtgtcccggtggttccgccagagcccatggcctgtatatcgccgacactgtgcactttcgggttggaaagcttcatgccggacgcataggcctcaaccagataggaaccgtcttcatacgtttcccacggtacggtcacttcaaaaccgtaattgccggttccggtgcctttccttaccaggtcttcccggtagtcgtcggcaggagccgtgtattcagcctctgtctggcccgtggcctggttggtgactgtgaccttaacctctaccgcggaagccggatcggagctgttccaggcccagccacggacgctgtcaccttccacgcaatcgaggactccgggagtctgccctgcgaacgccggcaggctggagcctaataaaaatgtcatcataagtaaagttccgaagaacagttggtttcgtttcaatcgtttcatgtaataaatacatcctttcttttttactgactgtaacatattttaatatataataaatatatgtaacagttttgtaataaatgaggtacaagtacacattttacactattttccaaatttgtcaaggatatgaataaaaaaaagacagcgagggctggctcagatgtggactttaattaggattcaggcgggattgcggtggcctggacgaggggagactaacaattatttttcgtttttttgtgagataatatttatttttcttgtgttttactattaaaagtggtattatataataaaatttgaagtgaatcattacggcatgaagttattttgctcgatcagattttcttaatttcggcacttcgccaatagaatccaaaataaagcaaaactattaaaagtaaataataacaaaaggaagagtaaaaagagctccaacacttgtattttacgtagatgccctctataattatggtatggaattcttctcttcctgcgtaaaattgaaagcgggagtacatgtgtatgggaaaaaaggatattgccctggccagatattttgaagatgaggaccgatatgcggatctgattaacggatacgtgttttccggggaacaggtggtatccggctcagatattttagaaaaaaatatcttggtgaccggtgttttggggacagtgagaaagtggtttgcagtccagaaataccgtgatgcggtaaagcgggtagtcatggggatgaactttgcggttatcgctctggagcatcaggacctggttcattatgggatgccggtccgggtcatgctcgaggatgccgccggatacgacgaacagatgcggagaatccagaaaaagaatcgaaaggccaggggcctgtcgagaggggagtttctcggcggttttcggaaagaagaccggttaaacgcaatttttaccatcgttctgtactacggtgcagaaccgtgggatggcgcaggggatctgtattcgcttattaattttaaggagataccggaaggtctgaagaatctgtttaacaactacaggctgcatgttctggaggtcagacgttttaaagataccgatctctttcggaccgatctgcgggaagtatttgggtttatagggttttccggggataaggaagcagagcgcagttatgtgtttggacaccgggaaagctttgagcagctgagtgaagatgcatacgatgtaatcaccgtgatgtccggatcgaaggaactggaagcagtaaaggaaacatacagagagaaaggggaaaaaatcaacatgtgcgaagcgatacggggaatgattgaggatggaaggctagaaggaaaattagaggcggagcagattgtggcaaaaaatatgtatttacggggtatgacagaagaggatgtggcaggcttgtgtgaggaggagattgagttggtgagaggctggttccgggagtggaaaaaggttgagaattgatattctgctatgaaaaaagagagattcctgattgtgtatgaggagtctctcttttttatcttattttaaaaccgcatgccatacggaatggtcattgatgcctgttattcaattgcctgaaatacttcctgtttttttactccataggccagtgcttcctggtggctggagaagtagagatccacggtatggccgtctacgctgctcccgatatcctccacggtataaaccgtttcgccgattatcacctttgttccaaggggaagtactgtgatatctgcggatatggtgtgatttggctgcggcacggtaccggaataggtgagaccgctgccgccggaacatttgctgcagctgcagtatccggtggtcttgaagatcccgagggattccccttttttatagccttcaaaggtttgttccgccggtatttcttcttttttcggaattcccgggccgatttcctcgccggagctctccgttttctttaagacttctgatgacggtttgtattccatggcgccggtaagaagtgtttttttatctccggacaccagaaaggcttccactttacagacagttccgcccagttcctgccagttgatcttatagtcaaatacacggcggccgtccccagtggaatttcccgcctcatcgctgtagctttcttccggtactgtaatgacctttgcagcttcgttgttcccgtctttgtaaatatgcagttcaaccactgctgcttcgccggaatccgcatcattcttcagccaccctgtgatatgagttccatccacgcctgtgagggcgcccttttcctcggcggcagcagtcatggataaaaacagggtacagaggagcgtcacgcacagcataagaagaaccttacctgatttctttttcatgatttacctcgcaatatcatgatttttccgtattaattatgatggaaaaaccgttgttatggtgtatcaattttcattatattacaaaaatgttaaatgtcaaggaaatcctgtcaatacgtttgtaacatttgtcttactttggtaaaacactttatgatttataaagaagaagttcacagaaaattctcaaaaaattttcaatcgaatgtattgacaaacgggggaaaaaagaatatattatgaaatgaagatgttagcactcccaaacgttgagtgctaacaggaagactcagaaaggaagtgtggcgggttgaatgataaggaccagttagacggccgaaagattacgatcttgaaggccatcataaaaacgtacttagaaaccggcgaaccggttggctccagaactatttccaagtacaccgatttgaatttgagttcagccacgatccggaatgagatgtctgatctggaggagctgggatacattgtacagccgcatacgtcggccgggcggattccctctgataagggataccgcttttatgtggatcagatcatgcaggagaaagaagaagaggttactgaaatcaaggacctgatgctaaagcgtgtggaccgggtcgagcttctgttaaagcagatggcgagaatcctggcgcagaacacgaattacgcggctttgatcagcgccccccagtatcacagaaacaagctgaagttcatccagctgtccagggttgatgatggaaagcttctggtggtcatcgttgtagaagggaatatgattaagaacaccatgatccccatcagccagcagttaagcgatgaagggcttttgaatcttaacattcttcttaataatgccttaaacgggctgaccatagaggaaatcaatctggacgtaatcagcagattaaaggagcaggccggcatacacagcgaggtggtcgaccgggtactcaatgaggttgcggaagcaatccgggcagatgacgatgatttgcagatttacaccagcggtgccacgaacattttcaagtatccggagttgagcgacggagagatggcaagccggctgatcggtacgctggaacagaaagaactccttcaggagctggtcgatgatgtgaacagttcagagagcagttcgggaattcaggtctatatcggcgaggaagcgccggtgcagacgatgagggactgcagcatcgtgacagcgaattacgagctgggcgagggcttgagaggaacgatcggtatcatcggtccgaagcgtatggactatgaaaaggttttgaatacgctgcggaatctcatgacgcagctggattcgatcctgaaaaaagatgaaaggtgaagggaagaacagtgagcagcgaagagacgagaatagaagaggaactggcagaagaggccatgaaggcagaagacaccggttccgttaacgaagaaatagaaaaaggcgaaacagaagccgcggaaaccgaagcgtgtgccgaagatgccgccgacgagaaatccggagatgaggagcctgcagaagaaaagcaggcggaaccggagaagaaaggattctttggaaagaaaaaagagaaaaaagatccgaaggatgccaagattgaagaactgaccgaccgtctgcagcggaatatggccgagttcgataattatagaaagagaacagagaaagaaaaatctgccatgtttgaaatcggcgccagagatatcattgaaaagatacttccggttgtcgacaatttcgagagaggccttgcagccgttccggaggaggataagggcactccgtttgcagaaggaatggaaaaaatatataaacagcttatgaagacgctggaagacaccggtgtaaagccgatcgaagcggtgggtcagccattcgacccgaatttccacaatgctgtgatgcatattgatgatgagtcccttggcgagaatacggttgccatggaactccaaaagggctacacctaccgtgataccgtggtgagacattccatggttcaggtagcaaactgactgtgagcactgaacgggatcctttcaagtttcgtgcgaacacatcgttataaaccgttttattaaaaatgagagaaaagacaatataggaggaaaaaactatgggcaagattattggtattgacttaggtactactaatagctgtgtggctgttatggaaggtggaaaaccggttgttattccgaacagcgagggtgtgagaacaacaccatcgatcgtggcatttacaaaaaatggtgagagactggttggcgagcctgcaaagcgtcaggcggttaccaatgcggacagaaccatctcttccattaagagacatatgggtacagactataaggtagcgattgacggaaagaattatacgccgcaggagatttccgccatgattctgcagaagttaaaagcagatgcagaggcttatttaggtgagaaggtaaccgaggctgttatcacggttcctgcatacttcaacgacgcgcagcgtcaggcaaccaaggacgcaggcaagattgccggccttgatgtaaagcgtatcatcaacgagccgacggcggcagcgctggcatacggccttgacaatgaaaaagagcagaagatcatggtatacgatttaggcggcggtacattcgatgtttccatcatcgaaatcggcgacggcgttatcgaagtactttccacaaacggcgatacccgtctgggcggcgatgatttcgacaaccgcatcacccagtggatggtagacgaattcaagaagacagagggcgtagacttatccggcgataagatggctatgcagagattaaaagaagctgcagagaaggcgaagaaggaattatcctcctccacaaccaccaacatcaacttaccgttcatcactgctacggcagaaggcccgaagcatctcgatatgaacttaacaagagcaaaatttgacgagctgacactggatctgatcgagcgcacggctgttccggtacagaatgcattaagagatgccggaatcaccgcttccgagcttggaaaagttctgctggtaggcggttccacccgtatgctggcagctcaggaaaaagtaaaacagttaacaggaaaagaaccgtccaagaccttaaatccggatgagtgtgtggcaatcggtgccagcatccagggcggtaagctggcaggcgatgccggcgcaggtgacattcttcttctggacgttactccactgtccttatccatcgagactatgggcggcgtagcgacaagactgattgagagaaacaccacaatcccgacaaagaagagccagatcttctccacagcggcagacaaccagacagcggttgatattcacgttgtacagggcgagagacagttcgccagagacaacaagacgctgggccagttccgtttagacggaattccgcctgcaagaagaggcgttccgcagatcgaggttacctttgatatcgatgccaacggtatcgtaaacgtatccgcaaaggatcttggaacaggcaaggaacagcacatcaccatcacttccggctccaacatgtccgatgatgatatcgataaggcagtaaaagaagcggctgaattcgaggctcaggataagaagcgcaaggaaggcatcgatgcgagaaacgacgccgactccatggtattccagacagagaaggctttacaggaagttggcgataagattgacgccaatgacaaggctgccgtggaagctgatttgaacgctttaaaagaagctattaacagagctccgattgaagagatgacagacgctcagatcgaagatattaaggcaggcaaagagaagctgatgaacagcgctcaggcactgtttgcaaaagtatatgaggctgcccagggttctgcaggtgccggccctgatatgggcgccggtgcggggaatgccggcggcggagcttcctatcaggacagcgatgtagttgacggagactacaaagaggtgtaagatagtctggtcagcccgcagggctttggaaaaagtgttgtagtgatacagcactttttccgcagttttcctatctggctgtccggcagacatgaatggccggtgccaggcaaagcgatgagtgaaaggtagacctaagatggcagaaaagagagattattatgaagtcctcggcattcccaaagacgcagacgacgcggcgattaagaaggcctacagggcattagcaaaaaaataccatcctgatacgaaccccggcgatgctgccgcggcggagaagtttaaagaagcatccgaagcgtacagcgtgctcagtgatccggataagagacgtcagtacgaccagtttggttccgcggcgtttgacggaagcggcggaccgggcggattcggcggtttcgattttaacggcgcggatatgggagatatctttggcgatatcttcggagatatctttggcggcggccgatccagaagcagtgcccgttataatggaccatcgaggggcgccaatgtcaggaccagtgtccggatcacatttgaggatgcgattttcggatgtgaaaaagagattgaactcaattataaagaagagtgtgcgtcatgtcacggaagcggggcgaaggcgggcacttcacccgttacctgtccgaaatgtaacggaaaaggaaagatcatgtatacccagcagtctttcttcggtcaggtacagaatgtccagacgtgtccggactgcggcggaacaggccgcatcataaaagaaaaatgtccggattgttacggaaccggatatatcacgaagcgtaagaagtttaaggttacgattcctgcgggcatcgataacgggcagagcgtgcgtctggccggagcaggtgaaccgggaaccaatggcggagagcggggcgacttactggttgaggccgtagtttccggccatcccatcttcaagcgccaggataccagcatattctccaccgtgccgatttccttcaccagggcggcgctgggcggtccgatccgcattaagacggtggacggagacgttgaatacgaagtaaaacccggaacccagacagacaccaaggtccgcttaaagggcaagggtgttccgtctctgcgaaataaagcggtccgcggcgatcattatgttacactggtggttcaggtgccggagcgtatgaatgaggctcagaaggaggcactgcgcagattcgatgaggcgatgggcggcgacagctctgaaggcgagaagcacagaaaaaaaggtatttttaaataacagtcatataaaaggccgttatcaggcagtaaaatcctgatggcggccttttcatttactgataattcctgtaaaaatacatgattccttattattatatggaatacacaaaatataattggttttatcttgtaaaaaacagtgaaaaccagtaaaatagaaatcaatatacgaagcatgtctgtttcggttttggggaaatccggaaaggataagggatgacagaagagcggcaggttatagagtttgtcaggcggtttcaccagacttgcctggaacagcaggatgttgaacagatcggtcagatgctttctgacgatattgaatggactggtgcgggaatctacaatagaataaagggacgggagaatgtcctgaacgcttatgcagcgaatcagaacagtgatctccatgaatatcagattctgaatgcggattacacggcatctgctcttgccggacatatctattccttttcaggaagctgctatgtcagatgcaggcggaagcagcaggaggatggcgaacgcgtggtgcgtgtgtcggggatctgccgttttgaggacggagccggatacatgatgagacttcatcattctcttccaaaccgcgcatgggagtctgatctgcagcacatgacacaggaggaggtgtgggctctccggagcctggttggcctgcagtccaaagagctggaggagaaaaattccaacctggacgcgctgattcagaatattcccggaggcgttatctgctgcagggatgatgcagatctggaactgatcttctacagcgacggttttttaaagatgttcggctacacaagagatgagatggagacaatctttgaaaataaattcagccgtatgatcgtgccggaggatcttaagagcacccgtcttgaggtgatacgccagatgaagaacgggaacaccaaggaaatcgaataccgtgtgatctgcagggatggaaattatcttgtcattcaggacaagggccagctggtcatgcgggacggccagcccgttttttactgtattctgatagatattacagagcgcagaaaggccgatgaagagctgaagatgagtctggagcggtatcagattatcctgaatcaggcgacagacatcatattcgagtgggatattaagagtgatacgctgacctgttccccgaactgggttaaaaaatttggctatcaggcggtgagcgatcacatatcggaaaagatattaaaacggggcaatctgcacagtgatgacgagaaagtattcatacagatgcagaaggaggtccttctgggatccccctatggggaaaatgagatcagactggctgcaaaggatggccgctacatctggtgcagggtgcggtacactctgcagacagaccaggagaagcggccggtccgggcgattgggctgattgcagacatcgacagggagaagcgggaaaaggaacggctgctggagctggcggaacaggattctctgaccggcctctacaaccggggggcggttcagacgctgatacagcggtatgtggtaaaggcacggccgtcagaccgctgcgttttgatgattctcgatgtggataactttaagaaagtcaatgatatatacggccatctgagcggtgatgcgatgttagttgatattgcggacatgcttcgcaggctgtttccggaaaatgcggtgctggcgagagtcggcggtgatgagtttgcggttctcctgtaccatgtgaaaaccatggaggaggcggcggagaaagcggaccaaattctcaaaagcttccggtcaatcttaaagcagcagaacgatatgatatcctgctcgatcggtatttccactgcgccggaaaatggcgataattttgctagcatctataaaaatgccgatgcagccctctatcaggcaaagaggcaggggaaaaacagatatgctttctatgcggagacgctggaggacgtgattcagccggagagccagactgatgtggctgaagcagcggtgatggatcagaaactggcagaccagaacctgacaggttatgtgctggatatcctaagccgatcacacagcatggagaaatcgatcaaccagctgctggagatcgttgggagacaggtggatgtgtcccgtgtttatattttcgaagacgacgaggatggaagcatctcatccaacacctttgagtggtgcaaagaggggatccagccggaaaaggagaacctgcagagcatagacatggattctcttgatcattactacgataatttcagtgaagaagggatctttttctgcagggatgtcagtacgcttctgacacatcagcgcatgctgctggaaagtcaggggattaagtcggtgcttcagtgcagaatcatggaccagggaaagccgaggggcttcattggtttcgatgaatgtacggaaaaccggtactggaccggcagccagatccggctgcttcagacgatttccaggattctcggtatctttttgatgaaggaaagagcccaggaacgtctctgcagggcgatgaacggattttccgcggcgctggaggagcagcgggactggttctatattctcgatatggagacgtgtgagtttctctacaccagtaaaaaggtgcaggagcgggatcctcaggcggtaaacggcggcgtctgttaccgggcattttttggagccgaccggatgtgcgagggctgtcccatgcttcttctggattctgtcagaaccagtgcatcgagcctcgtctggaaccggaatatgaactgctacgtgcatacgcgtgcccagtcagtgctgtggccggggggaaaagaggcgtgcatgatcagctgccgcattgtggaggggctggaaaagcagagagaaggattagaacgtaattagtacataatctggaggaagaaagatgagaaaaataagaaaattcgttttgacggcagcactggcatgctgcacggttctgtggttttccatggcagcatttgcggataatgcccaggaagtgcgggattttccgggatttaacggttccggatcgaagcagaccggaccgatcgagggaagcatttcctatgactgctggtatgatgaggacgacagcgatgacgataacagcggaccgggagcctatacctataaaaggggatggcgctacagcccgggcggctggtggttccagaacagtgacggaagctggccgtccaacgggtggaagtatatcgacggaagatggtatatgtttgacggcggcggccacatgatgaccggatggtataccgatggaaacggatataaattttatttaaatccaaccgacgatggaacgatggggtccatgagaatcgggtggcagattattgacggaaaagcgtactattttaacacgatgtccgatggaactctgggacggcttcttgtaaatacaacgacgccggatggatatcatgtgggtacagacggtatcatggctcaataaagggaacacggagggcggagccctgggaacccctggagcctgacagatcagaaaatagttcgaggatagaaaaaggctgaacctgcttgccgcgggttcagcctttttcatttcgattacaaactctaattgccgttagattgtaatatgtgaaaatgcgctctgtatccggtccctcatgactcggggcgagtgtgatgtggtgtaatgcatcaaggaatttcgtttttcttgatatgtttgccctttgttatcagtatggaacagaagtgattttcatccgttcaatagattaatgcatcagcaaaaggttttattgcatctatttcaaaattttttaaaaattttttctgaacctgttgttttaaagattccaggatgaaaatgaccggaatcatggattcgcggaattctgaaaaaagcgataaacgttgcggttgcaagcccatgaaatctatgctatgatatcatgtggtttatttccgtcttctacagacgagagaaaggaaacagtgaaaatgcaccagtatctgattgtatgtccgctggtatttttggccggctttgtggactccattgccgggggcggcggactgatttcgcttcccgcttatttagccgcaggcgttccgcctcatctggcgctggggacgaataagatgggatcgaccatgggaactgtgatatccacggcaagatttgcgaaaagcggatttattaaatggaagttatccttatttgctgcggcctgtgcgatcgttggttccatcatcggttccaatttatccctgctggcaagtgagaaatttctgaaaggaatgatgttatttgccctgccggttgtggcgttctatgttttgaaaaacaaagatatgggtgataataaagatacaggcagcctcccggagaagaagatgctggccgtcagcatggctgcggcgcttttaatcggtacatatgacggcttttacggtccggggacaggaacattcctgcttctggttttaacgggagctgccaaaatggatttaagaaccgcgtccggcacgacgaaggtggtcaatctctcctctaacatcgcggcgctggtgacctttttgatcaatggaaaggttctgcttccgttaggcgtaacggcaggggttttctgtatcgcaggccattatatcggctccgggctggtggttaagagcggccggaagattgtaaggccggtggttctggtggtgattatgtgtctctttgtaaaaattgtgaaaggataagggatcgttatgaaatggaaaaaatttacgctgaagaccacgacacaggccgtggatttagtcagcagcatgtttgacgagattggaatcgaggggatcgagattgaggataatattccgctgaccgcggaggagacgaagggaatgttcattgacatccttccggagctgcctcccgacgaaggcgtggcctttgtcagcttctatctcgatgacagccaggacgtggccggtattctggagcgtgtggaagaagggcttaacgacctgtccatgtttacggatttaggagagcgcaccatcaccgaaagcgagacggaggataaggactggattaataactggaagcagtattttaaaccgtttaccgtagacgatatcctgatcaagccaacctgggaggagatcccggaggagcataaggacaagctcctgattcagatcgatccgggtacggcctttggcacgggacagcatgagacgacccagctgtgtatccgtcagctccgcaaatacgtgactcccgagacggttcttctcgacgtgggaacgggaagcggaatccttggaatcacagccttaaagcttggtgcaaacaccgtgttcggtacggatctcgacgagaacgccattacagcggtgggcgaaaatctggaggcaaacgggatcagtggagagagctttacggttctccagggaaatatcattgatgataaggcggtacaggacgcggccggctatgaaaagtacgatatcgctgtggccaatattctggcggatgtcattatcatgcttcagagggagattccggtacacttgaagaagggcgggattttcattacctcaggcatcattaacatgaaggaagaggcagtgagagcggcatttgcggccaacgacgcgtttgaagtgatcgaggtgacgtatcagggagagtggctgtcagttacggccaggaagaaatagggaagagcgatgtatcattttttcgtaaatcaggagcagatcggacaggataccgtcacggtgaccggcccggatgtgaaccatataaaaaatgtgctgcgcatgaagccgggagaagaggttctgatcagcaacggtgtggataaagattatgtatgcaggcttcagacgattacttcggatgctgtgactgcggagattgttaccgttacggaaggcgggacggagctgcctgctaagttctatttatttcaggggctcccgaagagtgacaagatggagttcctcatccagaaggcggtggagctgggcgtttaccaggtaattcctgtggagacgaggcgtactgtggtaaagctggacgcaaagaaggaagaggcaaaggtgcgcagatggaatgctgtctcggagagtgcggcgaagcagtcaaagcggctgataattccggaggtgaccggtgtgatgacgtttcaggaagcgcttaactatgcgggcggatttgataaaaatatcattccgttcgagcatgcggaagggatggcggatacaaaggcgtattttgccggaatccggccggggatgagctgcgggatcttcatcggtccggaaggcggttttgaggatgaagagatatcccgggcatcggaagccggcgtaaagccggtgacactcggaaaaaggattctgcgcacggagactgccgggcttgcggtgctgtccgtcttaatgtttcagatggagagctgacaaagaggagaaattatatggacgtttattttgataattcggcgacgacaaaggtgcttgcgccggtggccgatcttgtgatgaaggtgatgacggaggactatggaaatccatccgcaaagcatggtaagggaatgcgcgcggaacagtatatcaaagaggctgcggaaatcattgcaggtacattaaaggtgtccccgaaggagattgtgtttacctccggcggttcggaatccaacaatatggcgctgatcgagacggccatggccaatcggcgggcgggaaaccatattatcagcacggcgattgaacacgcttccgtctataatccgctggcctatttagaagagcagggctttgaagtgacgtatttaccggtggatcataacggacatatcagcctggaggacttagaacgggctgtccgcagggagaccattctcgtatccgtcatgtatgtgaacaacgagatcggagcggtggagccggtggaggagattgcgaagctcatccataagattaatccggcgatcctcttacatgtggatgccattcaggcgtatggaaagttcgtgatacggccgaaacgtcaggggattgacctgctttccgtcagcgggcataaaatccacgcccccaagggcattggttttctctatgtggacagccgggtgaagataaaacccctgatctacggaggcggacagcagcggggactgcgctccggtacggagaacgtcccgggaatagcgggactcggagcggcggcccgcgagatgtatcgggatcacagtgaaaggcttaagcggatgtatgagatcaaggactatatgatcagccggctgggtgaagtcgaggggactacggtcaacagccttccgggagaccagtctgccccccagattgtgagtgccagcttttccggggtgagaagcgaggttctgctccatgcactggaggagaaggggatctatgtttcctccggatccgcgtgttcctcaaatcatccggcggtcagcgggactttaaaggggatcggagttaagaaagagcttctggattctacactgaggttcagcttcggcgtgtttaacacgaaggacgaggtggactactgtatttccgtgttgcaggaattgttgccggtacttcgaaggtatcagagaggctgaggaaaaagaaaggattactatgcagtataaatcatttttgataaagtacgccgagatcggcgtaaaagggaaaaatcgttttatgtttgaggacgctctggtgacacagatccgccacgcgttaaaggatattgacggagattttatggtggtgaaggagtcaggaagaatctatgccactgcggaatcggagtatgattttgacgaggcggttgaagcgcttagacgcatcttcggcattgcggccatctgtcctatggtccaggtggacgattgtggatatgaggatttaaagaaacaggtacttgcctacgtggatgaggcctacgaggataagaattttacatttaaggtcaatgcgagacggggaaataaaaagtacccggttaattccgatcagattaacagagatttgggcgaggtgatcctggacacgtttccggagacaagggtggatgttcatcagccggaggtcatgctccatgtggaggtgagaaaccggatcaatatctactcaaaggtcattccggggccgggcggtatgccggtaggcacgaatggaaaggccatgctgctcttaagcggcggaatcgacagccctgtggcgggttatatgatctccaaacgcggcgtgaagattgacgccgtctatttccatgcgccgccttatacgagtgagcgtgcaaagcagaaagtcgttgatctggcgaagctggtttctaaatattcaggccccattcatctgcatatcgtgaactttaccgatatccagctctacatctatgaccagtgtccccacgaggagctgacgatcatcatgcgccgctatatgatgcggattgcggagcgtctggctgcagatgcgggagcacaggctttaatcacgggggagagcatcggacaggtggcatcccagaccatgcagtccttagccgccacagacgccgcgtgtaccatgccggtattccgtccggtaatcggcttcgacaagcaggagatcgtggatgtggctgaaaagatcggaacgtatgagacttcggttctgccgttcgaagactgctgtacgatcttcgttgcaaagcatccggtgacgaaaccgaatttgaagatgattgagcgctcggaagagaagctgaaagaaaagatcgacgagatggtggagacggccataagtacggtggaaaaggtgtggtgctgatcaggagtattttccggtcaaaaaaagcttcaatcgttttacacgattgaagcgatttaccagttgatttcacttatacccgatagttttacagcgtatgacggtatcctgaccggattagtcaacgatgtatggctttaagatgtttacgatctcatcgacactgctctcagaatgaatgtttaagtcgatcggtttggataagtctaaactgaagatgcccataatggatttcgcatcaattacgtatcttccagataccagatcaaaatcggtatcgaacttggttaagtcatttacaaaagattttactttgtcgatggagtttaaagatatacgaactgttttcatgtgaaaaaacctccttgagattgttctttttttatcagggaatccccgcttgttcaagttcaatagtactggcatatggggtaaaagtcaatggtaaatttacatgaaaataaagatcacatactgtttatttagataggagaaaacaaaatgagaaaggcagccctgcataaccttggatgcaaggtgaattcatatgaaacggaggctatgcagcagcttctggaagaggcgggatatgagattgttccatttgccgaaggcgcggatgtgtatatcatcaacacgtgttccgtgacgaatatcgcggaccgcaaatcgaggcagatgcttcaccgggcaaagaagatgaatccgcaggccgtggttgtggcggccggctgttacgtacagtcagcgggagacgcacttaaaatggatgaggccgtggatctggtcattggaaacaataagaaaacggaactggtaaagatcctcgaaaattacttttcccatgaaggccgtatcgaagaagaaacggtgattgatatcagcgccgcgaaggaatacgaggctttaacgattcataaaatcgccgaccatacgagagcgtttattaaggttacggacggatgcaaccagttctgcagctactgcataatcccctatacgagggggcgtgtgcgctccagaaggatggaggatgtgcgctcggaggtggagcgtctggtggcgggtggctataaggaaatcgtgctgacaggaatccatttaagctcttacggtgtggatttccgggaggaggagagaaggacacttctcgatctgattgtgtatctgcatgaggtggatggacttctgcgaatccgcctggggtctctggagccacgcatcatcacgaaggaatttgcggaggcgctggcgtcacttcccaaggtctgcccgcattttcatctgtctctgcagagcgggtgcgacgcgacgctggcaaggatgaaccgccattatacgaccgcagattatctggagcgctgtgatatcctgagagccgcctttgacaatccggcgatcacgaccgatgtcatcgtgggatttccgggggagacgggcgaagaatttcagacgacggaagcatttttacggacggtgcatttttatgaaatgcatgtattcaaatactccagacgggagggaacccgtgcggccgtcatgccggaccaggtgcctgagccggtgaagacggagcggagcggtgtcctgctctctctggaaaagatcatgtccctcgaataccggaagcagttcctggggaagatgacagaggtgctgatggaggaagaattcgaatgggacggccgccgctatatgatcggccatacaaaagagtacgtaaaggccgcagtgccgtttgatgaaggcttaaaaggagccatggtctgcggaactttaacagagatggtaaatgatgaagtaattcttctcactcggtaaaaacaggaatttttatttttaggttgccgaaacgggatttatggtttagaatagagaagaacagttaaaggacgtgataacaatgggcgatattcataatacacaattttttggttcagtacaggaaaacaaactggatgtaagccaggttctggaacaggtttatattgccctctcggagaaggggtataatccggtcaatcagatcgtgggttatatcatgtctggagatcctacttatataaccagtcataagaacgccagaagtctcatcatgaaggtagaacgggatgagatcctggaggagcttatgagggtttatattgatacgatgcttaagtagtttgcgtggaagtcatagaataccgattgccgggtacaggaataatttgactgtcagatgaaggaacgaacggactctgacagttgtttttgtatcacaggaaagaggttcaaaaggtttgacgatcagtgggaattgcgtcctgctgtgatgaaatgacaacgtccggggggattatgactctgcaccggaatcatgacagtctgatctgccgtgttccgctgtgtgagcttcacccgcggaactctttatgatgtggagaaaatgagaatgagaatcatgggccttgattacggttcaaagactgttggcgtcgccgtgtccgactcccttggcttgactgcccaggcgctggagacgattacgagagaagacgagaacaaattgagaaagacttgcgcccgaattgaagaattgattcgggaatatgagattgaaaccattgttttgggttatcctaagaatatgaacaatactctgggagaccgtgtggaaaagacagagagctttaaagccatgctggagagaaagaccggactgccggtcgtgctctgggatgagaggcttacaaccgttcagtcggaacggatcttacaggagagcggagtcagacgggaaaaccggaaggcggtcatcgacaaagtggcggccggactgattctgcagggatatttggacagtctgccgggcggcacgaccagaggagagtaaagaaacgatgaacagtgaagaaaagaagatcacattggtgacagacgacggcgaggccgtggatttttttgtgttggaggagaccagaattaatggtatgaattatctgctggtgacagatgcggcagatgatgacgaagaaggagaatgttacattctgaaagacttatcggagagcggcgatgcggatgctctttacgagtttgtagaggatgataacgagatagattatttatataagatattttccgaactgctggaagacgcggatgtggatattgaaaagtgattttgagggactcatatatggatcaggaagtttttaaagacatgcttcgaaaaaagggactcaaagtgacgaatcagcgcatgctggtactggaaatcatggcggagcgcccgggtgaacatttaacggcggaggagatctatgacctcgcgaaaaagaaatgcccggagatcggactggccacgatctacaggactgtgcaggttctggtggacttatcggtaatcgataaggtaagctttgacgacggttttgcccgctatgaattagggggccttgaaagcgagtccagacatcaccatcatcacgcaatatgcagccgctgcggcagagtattttcatttgaaggagacctccttgatacgctggagcagaccatatccgacaccatgggatttaaggtaacggatcatgaggtaaagctctacgggtactgcagggattgtcagaagatcatggaaaaggaagaacaggacggaaaataatagaaaatggaggtaacagattgaagaaacaggacagcaatgcaaaaattaagatcattccccttggcggaatggaacagattggtatgaatattaccgcatttgaatatgaggacagcatcatcgtggtggactgcggacttgctttccccagcgacgacatgctgggtattgacttagtcattccggacgtgacgtatttaaaacagaatatcgataaggtgaagggatttgtcatcacccacggccatgaggaccatatcggggctctgccgtacattttaaaagaggtcaacgtgcctgtttatggaacgaagctgactattgcactgatcgagaataagttaaaagaacacaatttattaaaaaacacgaagaggaaagtaatcaagcacggacagtccatcaacctcggctgtttccgtattgaattcataaagacgaaccacagtattgcagacgcctccgcactggcgatctattcaccggcaggcgtgatcttacacaccggagacttcaagatcgactacacgccggtattcggtgagccggccgatttagagcgttttgcggagcttggaaagaagggggtactggctctaatgtgcgacagcaccaacgccatccgcccgggatttaccccatcggaaaagacggtgggcaagacctttgacaatatttttgcagatcataagtttaaccgtatcatcgttgcatcttttgcctccaatgtggaccgcgtgcagcaggtgatcaactcggcagccaaatacggacgcaaggtcgtggtagagggacgaagcatggtgaacgtcatcggaacggccagtgaactggggtatattgacattccggagggaaccttaatcgacatcgatcagcttaagaattatcccgacgagcagaccgtgctcattacgacaggaagccagggcgaatccatggcggctctttcccgtatggcgggaagcacccacaagaaggtatcgattaagccgaccgacgtggtggttttaagttccacaccgattccgggcaatgagaaggccgtgtccaaggttatcaatgaacttgccatgaagggcgccgaagtcatcaatcaggatacgcacgtttccggacatgcatgtcaggaagagatcaaactgatctatgcgctggtgcgtccgaaatatgcgattccggtgcatggagagtaccgccatctgatggctcagaagagtctggtacaggctatgggaattccgaaggacaacatcgttatcatgtcctcaggggatgtggtggaactgggacaggagtcctggggcatcgtggaccacgtccagtcaggcggaatcctggtagacggactgggggtcggcgacgtcggcaatatcgtgctgcgtgacagacagaatctggctcagaatggtattatcatcgtcgtgctgacattggaaaaatacagcaatcagctgctggcaggcccggatatcgtgtccagaggctttgtatatgtgcgggaatcagaagatttaatggaggatgcaagagcggtcgtaaacgacgccgtgcaggactgcctcgaccgtcatgtcaatgactggggcaagattaagaatattatccgtgacagcttaagcgatttcttgtggaaacgcatgaaacggaatccgatgattctgccgattattatggaagtataggcagacgggaagtacaggcagcagctgtacaggccgcacaagaaacaggataagcatcaaagaatcaggactttcgtgatgaaagggatgacagtatgagccgtgctacaaaagagatcaacagaataacgggagccatcatcgggatatccggaaggctgattgtctgcgcgctggtcgtgctgcttctttacgagggcgtgacaaagggctatgagtttggtcatgatattttctatgccacgtcagtggaagccgcgccgggcagggacaggagcattaccgtggaggaggggacttccatcacggatgcagcaaagctccttaagtcctacgggctgattacgaatgaatattcatttgtcatacaggccatcttcttcgactatgaagtgaatcccgggacgtataccgtgaatacctctatgacctccaaggagattcttcagatgatgaacgaaaataccggggaagaggaagagaaagaatgattgttaacgacagaattacggactacatcaattcgctggagagaagccggggcccgctcctgacggagatcgcgtcgaaggccaggaaggagcgggtcccggttatacgagaggaaaccgcgtctttcttaatctctctggtggagtcgaagcggccggcggctatattggaggttggcaccgcagtgggctattcaacgcttctgatggcgggcgccatgccggagaactgccgtattacaacgattgaaaaatatgaaaaacggataccagaagcccttcgaaactttgagagagcgggggagagtgaccgaatcactcttctcgccggcgatgccggagaaatcttgaagaaacttaccggtccctatgattttatctttatggacgcggcgaagggacagtatcttgtatggcttcccgaaatcatgagactcatggttccgggaagtatgcttgtctcggacaatgtgctgcaggatggagatattattgaatcccgctacgcggtggaacggcgggacaggacgatccatgcgcggatgagggagtatttatatgaactgaagcatacggaccgtctggctacgtcgattatccccatcggggacggcgtggctttcagtgttttaaaggtgcctgagattactaatgtgtgcccgtcatcagcgggagagaaagagatgtaaaaagatgagaaagacagaactgctcattccggctggaagcctcgatgtactgaagaccgcagtgatctacggtgcggatgcagtctatatcggcggagaagccttcggactgagagcgaaagcaaagaattttaccaacgaagagattcgagaaggaatcgcctttgcccatgaacatggtgtgaaggtttatattactgccaatatcctggcccataacgatgatctgccgggggtggaggcatattttgaggagctgaaggagattggaccggatgcgctgattatctcggatccgggagtgtttgccattgccaggcgcgtacttcccgagatggagatccacatcagcactcaggcgaataatacgaattacgggacttaccggttctggtacgagctgggtgctaaacgtgtggtgacggcccgggagctatccttaaaggagattaaggagatcaggaatcagattccggaggatatggagatcgagagcttcatccatggcgccatgtgcatctcctattcaggacggtgcctgctgagtaatttcatgacgggacgggacgccaatcagggagcctgtacccatccctgccgctggaagtattccatcgtcgaggagaagcggccgggcgagtatatgccggtttatgagaatgagaggggcacttttatctttaattccaaggatttatgcatggtcgaccacattccggagatgattgacgccgggatcgacagctttaagatcgaggggcgcatgaagacggcgctctatgtggcgacggtggcccgtgcctaccggaaggccatagacgattatttaaaagatccgaagctgtatgaagccaatttagcctggtaccgggaggagattgccaagtgtgttaaccgggaatttacgacaggcttttactttggaaagccggatgcgtccgctcagatttatgaaaacagtacgtatgtaaaggattatacgtatctggggacggtggcgtctgtggatggccgcggatacgcgaggatcgagcagaagaataaattctcggtgggagagaccatcgaggtgatgaagccggatggaaggaatctggcggctgtcgtttctgccatttacgatgaggatggaaacccgcaggagagcgccccccatgcacggcagatggtcgatgtggatttggggattgagatggaggagtacgatattctgcggagatgtgagagtcgggaagaataatagaaaattggaaggagattaaatatccggtgaatgatgtatgaggttattctgcatgattcccggatatttttttattaaattgataagagatttccagtctgacggatgttcagtatttataaaatagatatcattttccaaaaaaaatacatgttcaagtgccttacacttctgtaatatagaaagaaaactgattgagacttggagagaagggagacggaatgacgtgacaaagatgagagagaaaaatgggatttacgagcggcagccatttgaacttttcgcctatcatgacaaaaaaccaacgctggatcattcggtatttcattttcataacaattatgaaatcctgctgtatgtaaaaggaaatctggaaatatacattgaacagtcacggtatcttcctgttcctggaaccatgtttgtgataagtactgaggaggtgcataaaggtacaattctggattcagaggattatgaacgctatgtgattcatgtgagctcctctgtcatacagccgcttcttggatatgatgtggatttgctggcgtgttttcacggccatgagcctggaaagcagaatgcggtggtcttaagcatggaggagattgtagaattttgtgaacttttcagtaaactgaaacaaatcctggatacagagccgtacggaaaagaagtactgaagatttcctgtgtagcgcagcttatgactatggtaaaccacgcgttttcccacacgatcatgccggccagacccgtttccaatttagcttccggaattatggactatgtggagaaccatatgagcgaaccgctgagtctggaatccatagcggccgcgctgtttatggataaatactatctggcgcaccagtttaaaaagcagacgggagactccctgtaccattttattcttatgaagcggattgctctggccaggcgtcttctgggagaggggctgccggtgactgaggtctgtgatcggtcgggatttaacaactataacaattttatccgcacttttcgcaaatatgtgaatatgtctccgggggaatacaggaaacatcagacagggtagcgctttccatctggcagtcgctgcctccgtggcggagctgataggcgctgggggtacagccggtatactttttgaatacctgtgtaaaatagctctggctggagtaaccggattcgctgccggcctcggagaccgtggtctcactctctgtcagcaggcggcatgcgtgttggattcttaattcattgacatactgcttaaatcccttttttacatatttggagaaacaggtgcttaagtaactgtaattgtaaccaaatttgttggctatggtttccagcgacagatcttcttttaaatgttcgacgatgtagtctttgatccggcagatatcgaaggattctgccgcatttttctgtcggtgcggctggttggacagctgagtccacagtgctttgatctggttctcatccagaattgcctttgaaatatagtaatcggtgtgtgtgttccgcttttcaggcagcaatgcctcagaactcatcagcacggttgaggtctggggatatttcatggacaggaagacatacagaggcatcgtctgatggaacataagcatctcatcaataaagagaatgtctggtgtatgaaatgtaaagtcctgcagaacttcttctgaatctctgccataaccaaagatggagacttcctccggaagtgttttaaaaagcatatcgagtccccggattaccaattcttctctttccgcaatataaatttgttttcttctcaatttatatccccccctgagtcttcttacttatattgtttctgattttattatagtgaaagattatcgcgttgtctttgcggatgttggtaaaaatatcgcgtttcttggcatgacctgctgttataaaaaattataaaaaaatataaataaaccaaaataatctaaaaaaaattggctaattttttaatgattcgcaaaaaaggttgaaaaagtataggaactatataagaatatccattcaaattaagccaaaaataattaaaatatataataacagcataaaaggaaggagaggctatggaaaagaaacgtatgaagattatatggaatcaggtgttatgtgccggaaaaaagtgcggaaagagatggttttccggtatccttgcagtaattctggcggtatccggcggtgttgtgagggatcccatggaagcacacgcggaccagatatcacaggaggcgacctcatttaagacaggggaagcatggaaggatacggcgggaaaacagattcaggctcacggagggctgattcagaagtttggggacacctattactggtatggggaagataagaccagagggggccgtcccattgacggtgtccgggcatattcctctaaagatctctataactggactgacgaggggacggttctgaaggttatggaaaacagggaacagtttgagacggatgagtactttaagactctttatttcgattataacgatgctgagaaggataaggtctatttgaatttaagatcttcaaactgcatcgtggagcgtcccaaggtattgtataatgagaaaacgggaaagtatgtcatgtggtttcacagtgacggaccggaggcagggaaggaggaggattccagcgcctcccgctactccagggcaatggcgggtgtggcagtcagtgataccccggatggaccgttccagtacgtggacagctttaagcttcattgggtagagggatatgctggggtacagagacgcggtgattcccgagacatgaatattttccaggatgaggatggcagcgcctacattatttattccagtgaaatgaacgcttatttatatattgcaaagctgactgatgattatatgggacttcagactccagcgggaaaagttacaccagaagtggggaaaagcggtgacggagagacgtggcaggccaggattcttcctgataccagcagagaggctcctgctgtgtttaagtctggcgaatactattatatgattacttccgggaccagcggctgggatcccaatccggcaaaatactatcggtcaaaggatattatggcggaaaagtgggaggctatgggagatccctgtgagggaggttccaaaacaacctttgattctcagagcacatatgttgtgccgattgatccggaaaatggtttctatctttatatgggtgaccgatggaagaatggagatttgaaaaattccagttatgtttggctgccgttgatagtaaacgacgatggaacgattgttattaagaattatgatgagtggaatctggaggaaactcccagaaccattatgaagaagtcagagggacttgaggtatattacacaacggatcagggaaaggttccagcgcttccggaagagattacggtaacctggctgaacgggcagaaggagacagcggccattgtctgggaaaacttatcagcagcagattttgaacagccgttttccaaaaaaaatgtgtcgggaactgtgaaaggccaaaaaatttatacggatattgaggtagtaccggaaaatcttgtctattttgtggattgtggaacaggatcatggggaccggaatcgacagactatccggagattgcgtctaaaaatccgggccttttaaatcaggtgtctgatcaggaatacaaagatggcgctgaatgggggtatgtgaagacgacggcagcgaaagctctggttctgactcctgataacgcttcgggaaaagcagaatcaaaatacgatgttggcgtcaggactgcgctcgactatatcacttataagatgaaacttactgcgggaacataccagtttacagcaggttttcacgagtggtggagcggtcaaaagagaacgatgaagccggtagtcacctatacagatgccagtggagcagagatgagcgcagagggtggcacctttacaaccagcggttctgatatgactgtaacagaggaatttacaataccggctgatggagtagtaagctatacgcttaaaaagacagcaaacagtgccccggttctgagtttccttgcagtagggaagacaaaggatgcacaagagccggataagccggaagaagaaaagccggagcttgtcttatttgcctctgctttcatgctgaagggggagaacgaggcctccaatatcaagctgaactggaatcccatagagggagcggcgtcctaccgcgtctatagaactgatgaaaagggggagaaccgacagcttttaaaggagacagccggaatcatgcaggacgattacggtgtttctgaagcctcctggtatgtgaccgaggctctggacgagtctggtgaaattctggcagtatcggagccggcagagggaacgccggtaaagcttggcggagagatgaagacgaggagcaatatggcgccaggttctgattttgtctatgacagcaaggctgtgcaggtatttgcagaaaatggcgtttcctataagtattccatcgaaaaggatggagagacgggaaagaagctggtggagtatcaggctctggatggtgtgacctatgacgcaggcagaaccgtcctttccagtaaacagtatgagatcatgggcgattgtaaattcgagggcgttgcccagatgcgaaaggacggaaaaattattatatgggcacattttgaaccggcctccggctacagcagagcagagatttcctgcatgtcagggacgatgggaggagatgattttaccttctattcggagcggccccatggaaatgaatcaagagacttaaatatatttaatgacaatggcaccttatatgccatatctgctgcgaataataacaacgacttaaatatctataagatcgatgaaagctggacaagagtgctgccggaatcagaattcccggctatcacggtatgtgaagggcagcatagggaagctcccaacatggtgaaggtggatggctggtattatctgtttacttcagaggctaacggctggtaccccagtcagggaatgtattgctctgcttccactatacagggattagcagatgcggctctcgttccgattcatgtgacaaccttcggaacccagtcgggctggatgtcctcagtaggagataacaggcttttggttggaagtgtatgggcgtccagcggacagtttggagaaggaaaaaactggacaaaggtatttccggtcagctttaaagatggttacgcagtctataattactatccggagctggcatataacgacgacagagtcatggtaccggtccagaatggaaaaattctgtcggcagatcagcctgcgggaatagctgacggcgatgcgccgggagaagctggctgcgaggccgctctggtaacggatggcaggagcgatgacaagaacgtttactataaatcagtggagagcattggtgtgccatatagtctgactgtggatctgggaggactctgttctgtatcccaggtggatgtatccttccgggaacctaaggggtcagatacgagaaatttatataaaatttacggaagtaaagacggaataatatttgatgaggtccttgtggatgccagcagcaataagaatccgggatttgacagccgggccgtagaaaataagggactttaccgttacgtaaagattacggtcagcgaggtccgggatatgaggcataacgataacaaggtttcctggtccaggggcatacacgaaatgaccatatacggaacgccttccgatatgaaaataaccggatatgaacctgaaatggcagtggatctgggaagaaaaccggaattacccgcagctgtcacactggaatacagcgatgggcggactatggaagagccagtggagtgggagtatgtatctgcttcagaactgtcggaaccgtttgtaaagaagaacgttaagggaacgctgagaaatttcccggatatgacaatttcaaccactttagaggtaattccgaaggagttaaagtattttatcgattgtggtaccggtgactggggtgtgaaatcagaagaatttgaacggatttcttccgtagaaggagtaagcctgtttaatgatacttcagaccgccagttctcctcttctgaagaattgacgagacagtggggatacagcagtaagacgagtgatacgtcctccttaaagctgactccggacaatacaacaggttcctctgcctccaaatacgaggtgggattgagaacgaatctgagttccggaatttcttataaactgtatctgcctgcaggggaatacatgttctccggtggttaccatgagtggtggtcgaaccagaacagaaagatacagccatcggtaatctatgaggatgaaaatggacagagccatgaggagaagctgtctgtcgtatcgcttccgggactgggcagcgatgtgatgtcctctgatatagtcaaagtgccgaaggatggtgtcgtgacatttcaactgagtgctgccagcagtacaaagcccgtaatcagcttccttactgtgacaatgatgacagacgataaccggccggccggaaaagtaacagtatcaccggaaccaggaagatatgaattggacgtaattaaaccagtagaattgacatctgagtcggaggacagtatttattatactctggatggcacggatccaatgactggggacggaagcgaggaagcggcagaaggtgcagaactgtatgatactccaatcttatttgaagaagaaggaatctatgaaatcaatgccagaagtgtgagaaatgcatcagatggttctgttatatggggaccagttacgactgccagatacaatgtcacggagagcagcggaccagtggaacggtacgattccgttccggtaggaaagccgtggtatgacaataatggagagatgatccaggcccacggcggcggctttctccagatggaagacgagcagggggcagtctactactgggttggagaaaataaagatcataatggctccagctttaacggcattaatttatactcttccagggatttactgaactggaaattcgaaaatacggtgttaaagcctgattcggagaatcctgcgctcagagataataaaatcgagcgccctaagctaatttataataagacaacgggacagtttatcctttggggccactgggagactgcggacagctatgcttccagccagatctgcgttgcggtcagcgatacggttaatggggactatacattcctgggccactggagaccagggggtaaggaaaagaactggagaacaaaatctgtaaacggttcgactatctacgtaaaggatgaggaatatgagtctgctgtgacgaatcaggttacaccggatggcaatatgtccagagatatgacagtttacgtagacggagaccagggatatttagtcagcgcctgtgcggataaacattccatctgcatttatgagctgaacgatgagtttacagatatcttaccgggatctgaataccatgtgtttgaatccgacaagctggaagcgccggcaatcattaagtcgggtgactattattacttaatgggatcgggccagtccggctggtatccgaatcaggccagatatgcctatacgaaggatatttccaatccggaaggctggtcggagcttgaactgatcggcaacaatacctccttttacagccagcctaccaatattatggagctgacatcacccgccggacagaaaaattacgtctacatgggtgaccgctggaactccaagaagctgggagaatccacgtatgtgtggctgcctctggagatcgacggaactgacatgagtctgtcttacattccggaatggtctttaaacgcggaggatggaacagtacagtatgaggaggcagtggtggtatccaccggaaagcctgtcacatgcagcgtagaggggcaggaaggatatggtgtggagaaagcaaatgacggggactactttaatacaaacaagtcaggaaccagctccagttatttcagaccggtaagcctgccatttacgtggacggtggatttggaagaggtgtatgatttatcaagaattgatatcagttttaatcactggaatggatcggaagcgtatcaccagtatcatatctatggaagtgttgatggaaacagatggaaacagctggtcgatgaatctgataataagacaactgggtttaagagccatggattaaaaggccagtaccgttatatcaaactggaagtgataaaagcggtgaaagacaaggatggtcagtcggcagcctttgcagccggcctggtggaagtggaggtgtttgcagaagcgaaagcagaaacggcggatatcactggaattgagattaccgggcgtccatttaaaacaacgtatgaaaccggtgaagacttcaattcggaaggactggaggttgcggcgaaatacagtgatggaacttcggcgaagttagaatccggtcagtatgaactgagtgaagtggataccctggttacaggaaaaaaggatgtagttgttacatatacaaccggggaaggaaaggtatacaacgatactttttacatcattgtatacgatccggacgagatgtatgcagataagctgaaggttgtgaagcagcctgacagaacaatttaccaaaccggagaggaatatgatacagccggaatggaagtgcggattctcatgaaggccagcgccagcaatgccgtcccgacaaaagttaaagagctttccagtcaggagtatgagctggaatacgacttcgggaaaccggggaaagagaaggtgacggtagtctattatggaatcggtaagaacggggaagaacgtaaactgacagacacagtgttggtcacggtgattgatggagaaactgagtactatcagactggcattgcggtcgaaaaggaaccggataagaaggtttataaaatcggcggcagctttgaacggaccggaatgattgttacccgaaccatgaaggccagccccagcgatgccagtcccagcaacgcatcctatacagaagagattgacaattatcgtgtagagggagacgattttgcggaagccggaaagaagaccgtaaatattctgtatgatggaacagatcgtgatggaaatgataaggtgtttaaaacttctgttacggtgatggtaacagattgcaccagtgacgtagtggaagcagaatttgagaccatacgcagcggattgtgtgaagtcctgactggagagaatgcagcttttgctacagaggaggaaaagcagacggcagcagcagaggcgaaagaaaagttgctcggtgttctggaagagaatgaaggtgaatggatccttacggacgaaattatgaatctgatcgagtcgatcgaaacgtattatctgatggcatacacaaacgtcagaaaaataatagaaggaccggcatttttaacagacggcatgaagattacaggggcgggattaagcgccaatccccagtctgattaccagcgggtagaaattaccgtatctgaggcagaaactccggaaggactggaagagattgaagggaaacaggcaattgccatgatgtttgaactggcggtaaatggtgaagcggtcagactggcagcaccggtttctgtcagcatgaaagttccttacggaattcctgaggagaatttaaaaatcctttttgttggagaagacggatatacggaactgatccgcccgaaggtaaaagacggttttatggtatttggagttaagtccttcggtacgctggtggtgttctctgatacggagaatggcggcggggaagtggatgagaaaactctggatcatattgcggtaacgaaaaagccggtgaagaccgaatacagaacaggagaggagttcgaaccagaagggatggtggttaccgcttattactccgatgggacgaaggaggttttaacggaatacgaagtgtccggttttgattccggaaagacaggaactcagatgattactgtaacgtataaaggtaagacagcggaatttgaggtgactgtcaggaagagacagagttcctacggaggatccggttcgggaagttcttcctggggtgtttctgcggccgtgccaaatgtgccgggaacctggaagcaggacgagaaaggctggtggtatgagaagaaagcaggcggatatctgaaagctgagtggggacggattaacggaacctggtattattttaacgaggaaggctatatggaaacaggctgggttcaaactggaggccagtggtacttcttaaatgccgatggctctatggtggaaaataactgggttctatccggtgatcagtggtattacttgaagaacggtggttctatggcagcaggtcagtgggtaacctggaaggagaagagttattatttaaatcaggatggcacaatggctatgaatacggtgacgcctgacgggtatcgggtggatgaaaatggtgtgtggatacagtgaaaaacggaatggtgtttaaaaagagggctgtctaagttattttcacctggagacagataaaactctcaaaagttttggctgaacggctgttgatattctggcagttaatcatgtgccgaatgtatatgctttaagagacatccaggaacttttatactgggattataatttattatttataggaatttcaagcggggggcatgcatgccccctgcttgctgttgcaggaacagataagcattcagttgtgttattccggatacctcctgccttgggctgaatcatacttctgctttttcttgtagaaaatcttcgattatggtatactatgagaacttactgaggtatctcacgaacttatcggagtccgaactctgatggaagcggaggttttaatcatgacatggatcttatggcttttggcagcagcctgtgtcatatactatgtagttatcgtcatttattcgggttttaccacttcattttcctttatctggctggtatttgcagccgcctgcctgtttctggcattgggctgggaatattatatgaagcataaggaccgggtgccgctctggctgccggtgtcggttatcacattctgctgtacgggaattctggtgttttccatggtggagatcctgatttttacaggagcggccagccgggatgcgtcgaatctcgattatcttatcgtgctgggagccagagtaaaagaagacgggctcagcaaatcgctgaagagccgtctcgacaaagcgatcgattatctggaggaaaatccgggaaccgtgcttgtgctttcaggcggacagggagaggatgagccggtcagcgaagcggctgcgatgcgggactatctcgtgtttaacggtgtgagcgagcggcagctgatcctggagacccgttctttcagtacggtggagaacattgcctacagcaggattgcgatcgaggaagatcaggcggagcgcaaagcgcgtcatgccagatccgacatcatcatggagcccggaacttacgaagaaatttcggataaacccataagaatcggagttctgaccagtgacttccatgtgttccgggcagaacagatcgcgaagaaatgggggattccggatatctatggaatttccagcgaatcagatcctgtgctgctggtccatttctgtgttcgggaatgcgctgcgattttaaaagataaactggtcggcaacatgtagaaccgaaccattggcggtatgctgtatgagactggaaaaaagcggaattctgttcttcttttctgcatgataatgaaaacgccggagaatgggcaagatggtaataaagagaaaatgttaaggaaggaatatagaatatatgagacagttagagcatttgacagcctatgaggttgtggaagaaaaacagctggatgagatgaatgccacgggaaccgtgctgcgccataaaaaaagcggagcgcggatttttgctgtgtcctgtgaggatgagaataaggtgttttccataggattccgtacaccgccggaggacagtaccggagttgcgcatattctggaacacagtactttgtgcggctccggtaagttcccggtgaaggacccgtttgtagagctggtaaagggttccttaaatacctttttgaatgccatgacgtatccggataagacggtatatcccgtggccagctgcaatgaaaaggattttcagaatctgatggatgtctatatggatgctgtgttcaatcccaacatttataaggaaccgaagattttcatgcaggaggggtggcactatgagctggagagcccggaggcggatttaatctataacggcgtcgtctataatgagatgaagggcgcgttttcctccccggaggaggtactggaccgctatacgagaaaagttctgttcccggataactgctacgggcaggaatccggcggtgatccggcctttattccggacctgacatacgatcagtttttgaattttcacagaagatattaccacccatccaacagctacatctatctgtacggcgatatggatatggcggaaaagctggaatggctggatgaccagtatctctcgaaatacgataccctggagatcgattccaggattctgccgcaggagccctttgaccagccggtggaggaagagacccattattccatcacggacggggagtccgaggagcaggctacctatctttccatcaataccgtggtcggagatgatttagacccgcatctgtatgtggcgttccaggtcctggagtacactcttttggacgctccgggagcaccgcttaaacaggcgctcatcgacgcgggaatcggacaggacatacttggcggatatcagaatggaattcttcagccttatttttccgtgattgcgaagaacgcggataaggagcagaagggagagtttcttgctgtagtaaagggaacgctccgcaagctggcggatgagggaatcaataagaagagtttaaaggctggtctgaatttctatgaattccgttaccgtgaggcggattacggttctgcgcctaaggggctgatgtacggtcttcaatgcatggacagctggctttacgacggagaccccacggtgcatctgacctatcagaagacctttgattatctgaagcaggcagtggatgaggggtattttgagcggctgatccgtgactatctgctggataatccgtttgaggcagttctggtggtcagtccggagaagaatctgaccgcaaaggaagatgagaagactgccagacggctggccgcctataaggcctcgctttcgaacgaggagatcgctgctctcgtggagcagacaagggcgcttcgggagtatcaggagacgccatcccctcaggaggaattgaaaaagatccccatgctttccagggaagacatcggcagggagccggaagcgattatctgggaagaaaaagaggtcgaaggcgtgaaggtgattcaccataagatgtttacctccggtattggctatttgaaactgttgtttgatacctcccggattccggaagaagatttgtgttacgtcggcctgttaaaatccgtgctgggatttgtagatacggagcattatacgtatggtgatctgacgagtgagatccatttaaacagcggaggcatcaatctcagtgtcacgtcttatccgaatttaaaggacggcgctgattttaaaggcgtttttatcgccagcgtcagagttctgtacgataaactggacttcggcttctccattctcggtgagatactgaagaattccattctggatgacgagaagcggctgggagaggtgatcagtgagacaaggtcgagaggcaggatgaagctggagggagcatgccattcagcggcggtagccagagctacatcctatttctctccgacctcctattataacgatcgtacaggcggaatcgggtattaccagtttctggagcagctggacagggagtatccggagcataagaaggagattatcgccaggttaaaacaggtgatggcgcgtctttttaccgtgaaaaatctgctggtcagttatacggccgatgaggagggcttccggctgcttcccgcggcactccggagcctgaaggaaatgcttcctgaaggcagtgaggagacgtatccctttacgtttccggccggcaaccggaatgaaggctttaagacggcctcccaggttaattacgtggccaggtgcggaacctttgcaggaagcggatacgcctatacgggcgcactgcgcattttaaaggttattttaagctatgattacctgtggattaatttgagggtaaagggaggtgcctacggctgtatgagcggcttcgggcgctccggagaaggatatttaacctcttaccgcgatccaaacttaaaggagacgaatgaaatctacgaggggattgtggaatatctggagcatttcgatgtggatgaccgtgatatgacaaagtatgtcatcggcaccatcagcgatatggatgtgccgtacccgccttccacgaagggaagccgcggtctgtccgcatacctttccggtgtggatgaagccatgatgcagcaggagagagatgagatcttaaatgccacgaaggaggatatccgggcgctggcaccgattgttaaggcggttcttgccactggaagcttatgcgtgatcggcaatgaggaaaagatagaggcaaataaggagctgttccatgagacagagactctgttccactcataataaaaaccaactacgaaggagaatcaatggataataattataaatcaggatttgtaacgctgatcggacggcccaatgtggggaaatccacgctgatgaaccatttgatcggtcagaagatcgccatcacgtcagataagccccagactaccagaaaccgtatccagaccgtctatacggacgagaggggacagattatctttctggatactccggggatccacaaagccaaaaacaagctgggcgagtatatggtgagcgtggcggagcataccctgaaagaagtggatgtggtgctctggctggtggagccgaccacatttatcggagcgggagaacgccatatcgcggagcagctgcagaatgtgaagactccggtgatcctggtcatcaacaagatcgacaccataaagaatcaggatgagattctggaatttatcgctgcatacaaggatgtgtgcagctttgccgagatcgttccggtgtcggcgctgaaggataaaaatacggatctgatgctggatctgatctataagtatctgccctgcggtcctcagtattacgatgaggacactgtcacggatcagcccatgcgtcaaattgcggcggaacttatccgtgaaaaagcactgagactgctgagtgatgagatccctcacggcattgccgttaccatcgagaagatgaccgagcggaaaaacggtatgatggatattgaggccacaattgtctgtgagcgggactcccacaagggaattatcatcggtaagggcggcgccatgttaaagagaatcggcagtgcggcccgccgggagatcgaggatctgatggatacccaggtgaatttgcagatctgggtcaaggtccggaaggaatggcgtgacagcgagctgtatatgaaaaactacggatacaatgagaaagaaatttaggagcgggtgatagaattgagagaggctgtcaggcttaccggcatggtgttaaaggccattccgtccggggagatggacaaacgtctggtgatccttacgaaggaacgcggaaaagttacggcatttgccaggggcgccagaaggccgggcagtatgcttatggcctgcggccgtccctttgccttcgggcagtttacgctgtacgaaggacgggatgcctattccctgcagtctgcggaaatctccaattactttgacgagctttccacggatgtggagggaacgtgctatggctcctatttcctggagttttcagactattataccagggaaaatatggacggcacggccatgctgaagctgttataccagtcagtgagagccctgatgaaacctgcggtgcccaatgaactggtccggcgcgtgtacgagctgaaggcgatggccatcaacggggagtatacggaaaagcctcccagggaagtcagcgattcggccaattatgcatgggaattcgtcgtgctgtctccggtcgagcatctgtatacctttgccctgaccgacgctgtgttcgaagagttcgggcggtgcgtggagatcaataagaagcggtttatcgaccgggagtttcactcgctcgatattctggaggcgatgacggggcggcggcctctgtgagaaaggcagccggtgttataagtatggccgtgagtttttgctgagctttttctttgagtcagggggaataggagtgaatataaaaaaactgatcggtgagacaaatgcttatgataaaaagcaggcattagaggaacgccggcctaaaagctggtgtaaaagtgtaagtgcatttgcaaatgggaatggcggcaggctgattttcggtgtggcagacgatgacagtattacgggattgtgtcggaagatggaaaattgacaaatgcaggggcattgctggcagatgaatcccctattagacattctcgtttattttgtacgagatggaatggattagataaagcggcaggaacgatggatgcgctggatgataaggaattttcaggaagtctggtggtgttgttggaaaatggattggattttgtaagaacgaattcaaaagtgaagtggcaaaaggccggtgaagaaaggatcgaattgccggattatccgaaaagaagtgttttagaggggctggtaaatgcattaattcatcgtcaatatctggatttgggaagtgaggtacacattgatctgtttgatgacagactggaaatttactcgccgggaggaatgtgtgacggatcacttgtacaggagcaggatattgataaagttccatccaaacgcagaaatccggttattgcagatatatttaaccgtttgaaatatatggaaagaagagggagcggatttaagaaaattcaaagcgtctatcaatcacaatatttgtatacagatgaaatgcggcctcagttttactcagataaagacacttttatcctgacactgaagaaccttaactataaaaaaggagccgaaaaaggagccgaaaaaggagccgaaaaaggagccgaaaaaggagccgaaaaaggagccgaaaaaggagccgaaaaaaagcagtttcataagatggaggaaagaagagaaaaaatactgttattgataaaacaaaatccccatataacacagggagaaatcatggaaaatctgaatttgtccagaaaacaggttcagagtcttatgagaatattaaacaatcagggacagatccgccgggtcggctcaaatagaaatggttattgggaagtttttcgtgaaggcaggggctggtaaacagtaataaatgcagcgaaaaaactccggaggatctataaactattgaaatgacggaatgcatttggtataatgctttcatatgcgccaattgcaggaggatgatgaatgaaaaaaatgaaagcggtcctggcggttctcatcacagcgggattacttgccggatgtgcaggaagagggggaacaagtaccttcgagccgaagagcagcggcatattcgtgacggatgcgggaacattttcgacggctaccgtcgagacgtacgacgaccaggattattataatgaagaggaatggaagaccttccttgaggaaaatgtggcttcctataatgcggaacacggagagggagcggttgccctgcagtcatgcagcttaaaggatggtacagccagcatgatctttgattatgcgacaggaagcgatctggcccagtttaccgcactttatgaggacactgccaattcagtgaactccatcgatatcattcctgtggcccaggccctggaagaagctggaactgccggaacgatctttattaagacggcagacggcaagacggcatctacggatgagattgcgaagaagaccgattaccacgtggtcgccgtggatggaggaccagtcaagattcagacagaaggaaagattatgtatacttccgatggagtgaaattaaacagcagcttcatagcagagatctcggaaggaaagaattacatcatatttaaataaagtatccggatgcggatggaataaaagaagagaggtttgaggacatggaaaagacaatggagaaaattgtagcgctggcaaagtcgagaggattcgtttatccgggttctgagatttacggcggccttgcgaatacctgggattacggtaacttgggtgtggaactgaagaacaatgtaaagaaggcctggtggcagaaattcgtacaggaaagcccctacaacgtgggtgtggactgcgccatcttaatgaattcacagacctgggtggcttccggccatttaggcggcttctctgatccgctcatggactgcaaggcctgtaaggagcgtttccgtgcagataagctgattgaggattacatggccgagcatggcatcacgatcgaaggctccgtagacgcctggtctcaggaggagatgaaaaagtatatcgatgacaacaacatctgctgtcccagctgcggcaagcatgatttcaccgatatccgccagttcaatttaatgttcaagaccttccagggcgtgacggaggatgcgaagaacaccgtatacttaaggcctgagactgcgcagggaatctttgtaaactttaagaatgtgcagagaacctccagaaagaaaatcccgttcggcatcggacagatcggtaaatccttccgtaacgagattacacctggcaactttacattccgtaccagagagtttgagcagatggagctggaattcttctgcgagccgggtaccgacttagagtggttctcctactggaagcagttctgtatcgactggctgaaggcgcttggcatgaaggaagacgagatgcgcgcccgcgaccatgctccggaggaactctgcttctacagcaaggctaccacagacatcgagtttttattcccgtttggatggggagaactctggggtgttgcggacagaacggattacgacctgacgcagcatcagaacacatccggtcaggacatgtcgtattttgatgatgaaaagaaagaaaaatatattccgtatgtaatcgagccgtctctcggcgccgaccgtgtgacactggcgttcttatgttccgcatacgatgaggaagagattggggagggagatgtccgtacggttctccatttccatccggcgattgcaccggtgaagatcggcgtacttccgctttccaagaagttaaacgagggtgctgagaagatttacacggagctttccaggtattataactgtgaatttgacgacaggggcaacatcggcaagcgttacagaagacaggatgagatcggaacaccattctgcgtaacgtacgattttgattcggaagaagaccatgcagttacggtccgtgaccgcgataccatggagcaggtgagagttccgatcgctgaactgaagaattactttgaggataaattccgtttttaggacggaaccatccttgtgactgagccgggctgaccgtctccggataagaatacagatccggggcggccggccttttcttattactttcaaaggggtgatcggatgattctagaaaaattaaaacgcatggaagggtttacccaccaggagcaggcggtggcacgctacattctggagcacgtggaggaaatccagcagatgtccaccgaagaactggccagagtatcctataccagtaaggctacggtggtgcgtctctgcaagaaactggatacggcaggctatcaggaactgaaactgaagctggtttcagagctggtacagaatatccgtgtcaaccagcttctgaacagggagccgattacggaaacgagcacgctgcaggatatcctccatacgcttcccaagctgtacgacaaggcgattactgatacagagctgtgtatggacaagaatgttataaaacgcatctgcaaccgtattagaacctcagaccggatcgatatctacggaaatggaatcagctatatcctggcgcagtcagccgcatttaaatttgccaccctggggatggagtgcgccgcttacgacagtgtcaatgctcattttctgtctgcggggaaaacgaagaagaccgtgtcgtttgtcatcacctttaccggggcaaataagagtatgattgataccgccagatacttaaaggagacgacagagacatatgtagttggaattgtgggacggcataacgaggagatccgcaaatggtgccacgagatcgtggagatcccctcccgggactctctgctgagccttaaggtgattacctcctttacagccaccacctatgtgctggatatctttttctccatgctgcttgcccagacctatgaaagccatgtgaaatcctcgcttgaaatggtgtgccacgagacactccggatcggcgtggattactggaatttgaaggattcaccggaggaagaggacaagtccatgatttgaagccgtacacaggcgttcctgaaccgctgtttcaaaaaacagcggtttttttggtgatttttgaaacggtgaaccatttcgtgttttgcgtagtgaagaaaggggaatgatgtgttacgatgagaccatcaaaagaaaaaggggactgagtaaatggattataaaaaacttgcagaagacatccttgcaaaggtcggcggggaggagaatatctccggtctgacccactgtgcaaccagacttcgctttaacttaaaggatgaaggaaaagcacagacggaggcactcaaaaaggtaaacggcgtcatgggcgttatcagtaagggcggccagtaccaggtggtaatcggaagcgatgtagccagcgtttacaggccgcttacggagctgtgcgaagtgacggcaggggagggcggtcagccttcccaggagaaaaaagatgacaggaaggttgtggaaaagctgatcgacacgctttccggcatttttacaccgatccttccggctatcactgcggccggtatgattaaggcgattctggcgcttttgacggcgttcagcctggtggacaagacgggaaccacgtatcagaccctgaattttatggcggacgcggcgttttatttcctgccggtcctgctggccaattcggcggctaaaaaattcaaatgcaatccgtacctggccatgatgctgggcggcatgctgctccatccggattttgtcaatatggtggcggcttcgaaggagagcggagaagcgattcggatcttcctgcttcccatcaccaatgcgggatactcctcctccgtacttccgattattctgatcgtatggttcatgtcctatgtggaaccgattgcggacagaatttcccctaaacctgttaaattctttacaaaaccgctgattaccgcgattgtgacagggattgtgggtctggtggtcatcgggccgatcggaacgattatcagcaacttgatcgcctccggcgtacacggcttaaacaattactgcagctggctcgtaccggctctggtaggcgcatttacaccgctcttagttatgacgggaactcattacggcctgatacccatcggtatcaacaaccgtatgaccatgggatacgataccctgatttatccgggtatgctgggctccaacgtggcccagggcggagcagctctggcggtagccttaaagagcaggaaatccgagatcagacagctggcgtcctccgccggaatcacggctgtctgcggaattacggagcctgcgctctacggtatcaacattcgcttcaagacaccgctgtatgcggccatgatcggaggcggcgcgggcggcttcctcatgggaatcttaaatgttaagaactactcaggcggatcaccgggcttcctgacgctgcccagttatctgggaggcgatacgctcaccagcttttactttgcctgtgccggtgcagctgtcagcgtagtaatcgcatttatcacctcttacgttctctataaggatcccagcgatgaaaatggggagagggcaggcggtgaaacaaaatccgcgaagcaggattctgaatgggattctgctgaaaggagcagcggaaaggcagttaccattgccgctccccttaccggcgaagtggttccgctgggacaggtaaacgatcctaccttttcagaagagattctgggaaaaggcactgccattcggcctgctgttgggcgggtggtatctcctgtaaacggaacgattgccacgatctttgagaccggtcatgccatggggctcgtgtcggaggacggggccgaaatcctgatccatgtggggctcgataccgtaaatttaaaaggaaaatatttctccgtgaagaaaaaattcggtgacagggtaaaaacaggggactgtattctggaattcgacttagaagcgataaaagccgagggatatgacgtgattacacctgtcataatatcgaatcattttaactacagcgctgtcgaaaccgtggccgggggccaggtggaggcgggagcagatctgctgcggctgagcgatggaggtaacaatgagaacatttcctgatgactttttgtggggcggggcagttgcagccaatcagtgcgagggcgcttataacgaggacgggaaaggcctttccgttcaggatgtactcccccatggcctgcggggagagcgggcggaaggaccgtctgctgataatttgaagcaggaagcggttgatttttaccatcattacaaagaggatatccgcatgctggcggagatgggctttaaggtgttccgtacctccattgcctggaccagaatctttcctcagggagatgaagagcagcccaatgaaaaaggacttgcgttttatgacgctgtgttcgacgaatgcctgaaatatggaattgaaccgctggttacgatctcccactatgagaccccgctggggctggcggagaaatatgacggctggagaagcagaaagctggtagaatttttcgagcggtactgccgcaccatatttaccagatatggcggtaaggtgaaatactggctgacatttaatgagatcaattcacttcttcatgctccgtttatgagcggcggaattaaaacaccgccggaccagcttacggaacaggatttataccaggcgatgcaccacgagctggtagccagcgccatggcggtaaagctgggccatgaactgatgccgggggcaaagatcggctgtatgatcctgggaattaccgtgtatcctctgacccccgatcccgacgatatgattgcggtgatggaaaaggacagggagacgctgctgtttgcggacattcatgccagaggaagatatccgaagtatctcttaaactactttgaggatcacggaatctcaatccgtatggagcctggagatgaggagatgcttaagcataccgttgatttcatctccttcagctactattccagtatctgcgccacaacgcatcccgagttaagcgaaccgaccggcggaaatttatcgagaggctataaaaacccgtatttaaaggcctcagcctggggctggcagatcgatccgaaggggctgcgctacaccttgaaccggctttacgacaggtaccagcttccgctgtttatcgtggaaaacgggcttggagccgaggatgaactggtgacggtgaacggggagaagacggtccttgacgattaccggattgattacctgcatcaccatcttttgcaggtacgggaggccatccgcgatggagtggaagtcatgggatatacctcctggggctgtatcgatcttgtgagtgcctccacatcagagatgagaaagcggtacgggtatatctacgtagaccggaatgacgatggtacggggagcatgaaacgataccggaaaaaatcgttctggtggtacagagatgtgattaagagcaacggggccatattgtaaatagtattgcagaccggaagtccggcggagatgaacaacattccgctgggcttttttgctgcgttttttggcggcctaccggctgtcctgtatcggaattaatacatggtaatagtctgaatgtattaaaaatgaagtgaatttaatacatgtgccagccggattttggcaatttacatcaaaaatatcttaaaaaaacagcataatcatgaaataaatatacattatagacgataaaaattaattatgataatataatattataatgatactatatttaagattcaaataccagggatgtccgatattgttttgtaaatacgatagcgtagaaaaggaggaatgatcaatgcttaaccgggaaaagggggcgccgcctctgtatcatcagctaaaagagattctaaagcaggagattgaagaagaaaaatataagaaaggcgacagctttctgacggagcggcagcttcaggagaaatatgatgtaagccgcgttaccgtccgccaggcagtcagtgaactggtgaatgaagggtatctgcaaagctccagaggagttggaactactgtagtatttagtaaaatagacgaaaatttgaaacaggtgatcagcttctcagaggaaatgggccgccacgggatcacaatgatgaccagccactgtgttatgagccgggaaagggctgggaaaatagtggctaagaacctaagaatgaaaaaggactgctattgttatagactggagcgggttcgctgtgcgcagaatattcctgtagtgtattcgatcacgtggctgactaacaagtatcatcttcccatagacaacgatttgtacaaggattcattgtataagctcctacaggaagaatacagcatcgtgatagccgggggcagggatacgtttgaagcggttctggctacggaggtgattgggaaattcttaaatatcacccctggccagcctgtatttaaacggatccgaagtacgtatgaccaggataatgatgtcctggagtatacgatctgctattatccaggagagaggtataaatattctgtagagctgtgacggaaattctgggtgatgaacaatttttgggaaacgaattttaaggcagacttaggcggcttttacgagtttgcctatacggtcagaaccatggagaacgtatctgcgccggaagcccttgaaagctgtgaaacagacaatgagggacttttggccttctacatagagaaggcgtagcttcatgctgaccgggaaaggaagagtatggaatcctgttatctgatgatggatgtcggcggtaccgggataaaggcagggctattttcccggtccggagagatggtggaacgcgtccgttcctttccggcaagggcgaaggaggggcgtgaggagatattccggaattttgcctgtatcatacaggagatggcaaaagaccggatggtggaagggattggcatggcatttcccggtccctttgactatgaaaagggaatcagcctgatgagagggctggacaaatacgattcggtctacgggattcccgtccgggagggtgtgatggaacagctggagagaatcggcaaaaccgagagcgtggcgcgcggctgccggttcctgtttcttcacgatgtagaagcgtttgccatcggcgcctgtcggcagggacgcatggccgggtgtaaaaaggtgatgtgcgtgtgcattggaacaggcgccggctctgcatttgtggaaaacggccgtgttgtaaaaaaagcgggcggaggcgtaccggaaaacggctggatctacaatacaccttataaagagagcgtgatcgatgattacgtatcagtcagaggactaaaaaggcttacggaaagcgtatttgcgcggccggaggctgttgacggggcgaagctttttgaactggcagaggccggcagcgatgaggccgcgaaagtctttgctgcatttggtgagaatgtaagtgaagcgctgacgcctttcctcaagtcgttccggccccagggactggtgctgggcggacagatcgcaaagagctttccccactttggaatgcagctgcgtgaggtatgcaggcatacgggaactgctgtatttaccgagccggatacttcaatccgcgcgatggagggcctgtacgccgcgatggaacgggttaccggggcgaaatgaatacaatggaaggaaactaagttatgataaatcgggaaggctatggaaattacgatttgcatccatataaagagataaaaggatatgagggacacgccctggaaggcggctgtgctgttctggctcagttaaaagcagaagagaaagcgggaaaacgggtgatcgtctgtgatttctatcccggtgtggaccgggaagaggctgccggacttttaaaacagctggaaccggcgctgctcatcgatgcagacgcgtgcgcagttccggaagaggaactgaccgcacagtggaaggactatttaaccgatgaccgggtctttggcgtgatgtgccataagagccttaaggactgtttttcggaggagaagctggaagcggcaagaaaagcagtggaagagacggaatcgggtcttgtggtggtgtacggcaccggcgcttcctatattacatacggggatgtgtacgtatattttgatatggcccgctgggagatccagcttcgttaccgggccggaatgcctaactggaattgttccaataccggggatccggtcttaagtaaatacaaacggggcttttttattgaatggaggctggcggaccgctataaaaaggagcggttccagcggttcgattatgtagtggataccaatgagagaaataatccgaagatgatcaccggggaagcgttccgggaggcgctctgcagagtcagcagcgagccgttccgcctgcagccctacttcgatcccggcgtgtggggcggacagtggatgaaaaccagattcggtctggacccgtcggaagataattttgcctggagctttgacggcgtgccggaggagaacagcttaaacttaaaattcggtgaggtgacggtggaaattccggccatggacctggtgctgtaccagccggtaaagctgctgggtgaccgagtccatgcaaggttcggggcagaattccctatccgcttcgaccttctggataccatgggaggcggaaacttatcgctgcaggtgcaccctttgaccgaatatatccaggatcagttcgggatgcattacacccaggatgagagttactatattctggatgcaggagacgacgcctgtgtctatctgggcgttaaaaaggacgtagacagagacgccatgttccacgatttagaggaggcgagagaggggaaaatcctctttccggcagagcattacgtgaaccggattccggtgaagaagcacgatcacgttctgatcccggccggaacgatccactgttccggaaagaatgccatggtgctggaaatcagcgccacgccttatatctttacctttaagctgtgggactggggcagagtgggcctggacggtcttccgcgccccatccatttagagcacggagcggcgaatatccagtgggaccgcgatacggactgggtgtatgacaatctggttcatcaggaacggaccatacgggaggaggaaggccttaagctggaacgtacgggacttcacagccgggagtttatcgaaacccaccgttacacactgacaaagccggtggaatgttccatggaagacagcgttcacgtgctgaacctggtggaaggggagaaagcgtttattgaaagtccgcaaggcgcctttgaaccctttgaagttcattatggagaaacctttattattccggcggctgtaaagaaataccgtatccggccggccggagccgataaaaaagaaccggtggctgtgattgccgcttcagtaaaataagccttaatcaatggaggagtatcatggattatcagaaaatcaagaaagtgcacgtcgtatacaagactcacttagacatcggcttcacggatatgggccggaatgtactggaccgttatgtaaaggaatatattcctcattccgtccgcctggcagaggagatgaatggaggaaaggaaaaacggtttatctggacggtgggatcgtacctgattgactactatttaaaacatgcggatgcgaaggccttaagcgaactggaggccgccattgaaagaggagatatctgctggcacgggattgccagcaccactcacacggagcttctggacatggatttattccaatatggcctggagctgggcagcaggctggattcacgttacaaaagacacaccattgcggcgaaaatgaccgacgtgccgggtcatacgatcgcagtagtggatgcgctggcagataagggaatccgtttccttcatatcggagtcaacgcgtcatccatggtacctgagattccgcagacattcgtctggagacatggaacgaagcagatcatcgtccagtattcttcccagtacggggcgccggggtatgtggaagggatggatgaggtgctggagttcgcccatacaggcgataatctgggaccgcagtcggcagaggaggtggaagcggaatacgagcggattagaaagctgtatcccaacgccgttgtggaagcctccaccctggatgcgtatgccgaaagccttctggcagtggaagagacgctgcctgtgatcgaggaagagattggggacacctggattcacggcattggttctgatccgtggaaggtcagccgctaccgcgaattaatccggcttaaagatcaatggcagagggaaggccggttttccagggattgtgaaggctatgatgcatttatgatgaatctgatgctgatcgcagagcatacctgggggctggattacaagaaatatctggccgactttaagaactggaccaaggaagactttcagaaggccagggcggcggacgagacgactctggaattcttaacaaacagaaatgcacagatgcgcgaagtgctggacattgatttcaaacggtaccgcggcggtgtctttaccggatcttaccggtattatgagagctctcatgaggagcagagggaatatttaaagaaggcgttagaagaactgcctgccgatttaaaagcggaggcggaacgtgcgctcacaggctgcataccggtaaaggaagagtccgaaggccgcagggtctgcgtgggagaaattctggaaatcggcggctggaaagcggcagtcgatggaagcggagccataagaaaactggaacggggaggcagagactgggcaaaggacggagccatcggccggctgggatatgagaccttcaatgcgctgaactgtgtccagaactactaccgctacaaccgggcattctatgagaatggctgctggtcggagggcgatttctccaaaccggggctggagtttgtagaagatttggagaaccggtattatgaattcagcgtcagggatttgagggtctgcggagaggaacttcttattgacctggcgggggacgccgaagcggcagaaaaatacggctgtccgcaggcggctcagataaaatacgtgtttggcccgcagatcacctgcagcgtgtcctggtttggcaaagacgcaaaccgcatgccggaagccctttggttcgactttatccctgatacggagaacccgaaccgctggctgatggaaaaaatgggagttcccgtctcgccgcttaatgtcttgagaggcggcaaccgcctccagcactgtgtggaacggctggtctatgatggttccgacggaaaaatggcaattgagactgtacatgccccgttagtcagcgcaggcggacggaatctctacgatgattatcgcaggctgccggatttgagaaagggattttcgttcaatctgtttaacaataaatggggaaccaatttctgcatgtggtgtgaggatgactgcagatttgagttcaaacttgatatttcggaaaaacggtaagagatatcggaggggatcggccgtttttccgttaagagagcggctgtgtactcaggcgttcgccctttccagtatccatccggcaatcaggcgggtgaacggctccatgtcgtactcctttccggaagcggagaggacctgccggtatgcttcccggcgttcgataccgacagtaacgggacagtaaccttcagaagccagaatcaggttcatgagaagaaacgcagtctcttcattcccgcggtcaaatggctgaatatcaatcagccgttttccggccatggctgccagttcgatggggtggagcgaggactttgaggagcggatctgatccgccagatggccggtcagccttggaacatcctccggctgaggcggctgatatccgctgtctgcatcggccggcatgtcggtgcggtaggaatctgacggagtggagccgctttcggctgcagttgttctgtggagttcccttatggtttcttccataatggcaatatcctgttggcggccggttttcaattgatccgccttctgtaacagttcttttaatggtgtcatgatgattacctcctcagggcacattataccacacggaaagaaaaaggtgcaacgggatctgctttatctgccggacagcaaaagtcctcccggccgcggctgtatcagtaaacgctgcggctgggaggacttctttgatttcaatatgtcttttatctctgtcccttgtcgtaaggcacgccttccgccttcggagcctgggaatttttcgatgtaaataccagcacgatcagcgtgatgatatacggcaccatcttgtaaaaatagctgggaattccgaggctgcttaagaacggaattccggagtatgcagccgccactgccttcatcagtccgaagaacagggaagcgaacatgatcttgaccggcttccactgaccgaagatcagtacagccagagccaggaagccgtatccggctacatcggcgttaaagttggtggaggtcggaacgacgaataccaggccgcctaagcctccgagcgcgcctgagatcaggacgcccgcatactgcatgtggtagacgttgatgcccgccgcatcggccgcctggggatgctcgccgcaggagcgcaggcgcaggccaaaccgcgtcttataaagtacaatcgtggaaattacaaaaattccgattccaatgtaggtggtgatataggcgttctggaacagcagcggtccgataaacggtatcttacccagcacgggaacggaggtgatacggaaggtattggtaaactgtacctgctgcacgccctggatgacgcgggccacgaagatggcgaacgcgggggcgaacatgtttaaggcggtaccgctgataacctggttcgccttcatgttgatggaggcatatccatggaacagggagaaaaacatgccggtcgccatggagattaagactgccaggatcagctgcatctggccactcatggtgcctcctgtgaagtggatgaacaggattccggtaaacgcacccatggtcataattccttcgagagcgatattgatgataccgctgcgttccgagaacatggcacccaaagccacgatcataagaggaatcataaaatacatggtctgctgaaagataaaataaataacactcatgcgtctcctcctcctttcgcctgggcctcttctttttcatggcgcgccttctgcacccttccgatcagcatcttcaccataagggcaaaggcgctgaaatagatgataaccgccacaatgatatcgatgatttccgttgaaaattcaaacagctgcagatagaatcctcctgccgttaagtaggcgataaagatgccggagaacagaacgccgatcggattgctgagtcccagcagggcgacggagattccggtaaagccttcggaagccagaacatccttgatctcgatgtgttttccggttccggccagatagaggaggccgccggccagtccggcgatggcgcctgcgatcatcatggacatgatgatgcttttcttctcattgatgccggcgtatttgctggcgtcgcggttgaagccgaccgctttcagctcataaccgaatgtggtcttgtttaacagcagataaatcaggatgaccacgataatggcaatgatgatgcctccgttgacactggagccggggaatatcttatccagccccatcttcggaatatttgcggtagccgccacgtttctcgattcatttcttaaattgttaaacagcggcttactgctctttacaatccagttgacgagatacatgccgatatagttcatcataatggaggcgattacctcattgacgttataataggcctttaacagacccggaacgaggccccatacggcgcccatgacgacgctggcaagcagagccacaaaccagtgtgccggccctaaggaggtccacagaatccctacgtagacggctccaaagccgcccatgataaactggcccggcgttccgatgttgaagagtcccgttttaaaggcaaagccaacggagagaccggttaaaatgatgggagtcgcatagtagaatacctgcccgacgcccttggccccgtgggtaaacgcccccgtcagaatcgttgcaaatccgggcagtgcctgggccggattgcagaggaacaggatgatcaggccgacgatcagtcccagcacgatggcaaagatggaagatagtacgccagtgtaatcccgtggttgcttctgtttcatgattggccaccttctttctttgaaccggccatgtagaggcctaattcctgtactgtaactttcttgggatctaaatcagccacaacagagccctcgaacatgacgagaatccggtcgcttaggttcatgacctcgtccagctccagggataccagcagaatcgcggcgcccgcgtcacgctgcttgattaactccttgtggatatattcgatggcgcccacgtcaagacctctcgtaggctgtaccgccagcaggatgtcgtggtccctggtaacctccctggccacgatcgccttctgctggttgccgccggacatgcttcgggcgctggtgtaggggccttcgctgctccggatatcgtaactttcaatcagcttttccgagtaaccgtagatgctgtcattctttaaaaaagagtacttctgaaaatccttctcaaaatactgctggagcaccaggttatagcccagattatagtccaggacgagtccgtgtttgtggcggtcctccgggatatgggagaggccgtgggtatttttatagcggatgctctttttcgtcacatcctggccgtttaacagtaccgttccctcactcatctcagccagtccggtgatggcgtggatcagctctgtctggccgttgccgtcgatacccgcgatacagacgatttcaccttttcgaacctggaaggtgacattgctcaccagattcttggtgtgcccctctttgttggctctgacggataaattctttacttccagaaccacgtctttcggggaggcggggcccttttccacagtcagattcaccttgcggcccaccatcatctcggacatttcctccggcgtggtgtcttttacgtctacggttccgatatattttccacggcgcaggaccgtgcaccggtcggcaaccgccttgatttcgttcagcttatgagtgatgaagaggatggactttccctctttcactaagtccctcatgatctgcatcagttcgtcaatttcctgtggggttaagacggcggtgggctcatcgaagatcatgatttcattgtcacggtaaagcatctttaaaatctcgactctctgctgcatgccgaccgtgatgtcggagatcagcgcgtcgggatcgatggtgagctggtatttctcacttaaatccatgatttttttccgggcgtcgtccattttcaaaaagccgtgtctggtagtctccataccgaggacgatgttctggagaacggtaaaattatgtaccagcttaaaatgctggtgaaccatgccgatgcccagcgcgttggcatccagcggtccggtaatcttttcttcttttcctctgaccttaatgacgcctgcttcgggctgatagaggccgaacagaacgctcatgagtgtcgattttcctgctccgttttcgccgagaagagcgtgaatctcgccctttttcagctgcagagtgatgttgtcgttggcgatgatgccgggaaattctttcgtaatattcagcatctcgataatataatcatccatgggaacccccttgcagtgcaaaaaaaggagatggcgtaagatacccgtcttcagttgtgactggaaaatcaaacgccatctcctttcttatgcagactcgattattctacgaagttgatagttgtcttttcaagcgttaaatccttggttgggtcgttgttgtcttcagaaggctgtacgagagtgatcttgccatcctttaactgagagtagaccgcgtcgtaatctgcctgtgtgaagttcgtaaacttggaggtctccatcggaagaccgataccgtcgttctttgcagagaagatgctggtcttgccgcccgggaagctgcctgcatagaaatctcttacgccgtcgtaaacagatacggaaagctgtttcatagcggaagtgattactgtgtcggattcataactctggtcaacgtcaacgccgatgaccttggcgctcttttcttcagcagcagccataacggagttgcctactgcgccgccgcatccgaagatgacttccgtgccgttctgataccaggatgcagccatggactgtgcttccggtgtcgccgcaaatgcgcctgtgtagttatacatgatctcgatgccgtccacgcccatctctttggctgcgtagtcagcgccttccgcgaagccgtagccgtaacggataacggccggaactgccataccgcctaagaatcccagcttggtatagccgtcttttactgctgcgtatccggcgaggaagccgggctcgtcttcctggaacaggatcggcatggtattggcttccgttctgtattcagagtagtcgccgctgtgaggctcgccatccagaaggatgaaatgtacgtccttgtactggtcctgtgccagataaacaggctcttcaaataagaatccagggcatacaaccagtttcgcgccgccttcaatggccaggccaatggtctctaagtaagagtctgtcgttccttcctgtggctgatagtacttgtaggaaataccgttttcttcggcgtactttttcatgccctcccaggcgccctggttgaaggacttgtcgtcgatggtacctaaatcggtaacaagagccagttcataaccgtcggaagattccgattttactgcggtaccggctgttgtctctgcttctgccgctttcgtttccgcggcagttgtcgtctccgcgggagcagctgttgtgctgccggaaccggaattcgaagaaccgcatgcgcttaaggatgccgccatcaggaccgccagtgttactgctaatgctctctttttcataatacgtaattcctcctatcgtttgaaagattgttattagagctactattactttaccatattttgtcgatagaaacaacgttatcgggcgcgattttacagaattattataaaggagcttgtcatttaaagaaaaaatggtaaactgataaaggatttaaacaaaaggaggaatattgtgcagaaactaaatctcttagaagaaccggttccaaagctgtttatcaagtatctgatgccgtccatcagcgcaacgctggttacttctatttatattttggccgacacgctgatgatcggccgcggagtgggagccgtgggaattgcggcgttaaacctgctgcttcccttattcagcctgttttttggaacagggatgctcttcggcgtcggaggaggcgttctgctctccatctcgaagggacggcgggatgaacgggcggccagagagtattttacggtggccctctggctggccgtggcctttgccgtcttttacattgcaggcggacatctgcttttccggccggtgacagaatttctgggcagaaatgataccatggggaattacgtggatgaatacggacgcgtcctggttacgggagccccggtgttcttattctcagcctttttgcaggcctttgtcagaaacgaccgggcgccgaaggtgtccatggccgcggtggtggcaggcggcgtgaccaatgtgattctggattatatctttatatttccaatgaagatggggatggcaggggcagctgtcgcctcggtgatcggctccctcctgacggtgggaatcctgctgactcattttttctcaccggagagcacgcttaagacggtggcccgcccgaactggaggaaggcatgggaagtggtgacagccggctttgccagcttcctgctggagatgtgcaatggcgtggtgacatttttattcaaccgccagcttcttgtctacgtcggggatctgggcgtcgtggtgtatggaatcatttccaacagcgctctgatcgtggcttccatcagcaacggcatatcccaggcggttcagccgattcttgcgaccaattacggcgcaggcaggaaggaacggttaaaggagacacgccatttgggtgaaatggcggtgaccgtgtcgggcgttctctttacgggaatcggccttttgctgccggctctggtgacggcagcctttgtaaagcctacggcggagattctggccatgtccgtcccggccgtgcggatctatttcctgtcgttcttcgctatgggctttaatattctttacagcacgtatttccagtccgtgatgaagccgggatactccctgttcatctgtatgatgagagggatggtattaaatgctgttcttgtgttcctgctgccgattgcattcggcgttaccggaatctggtccgttatgcctgtgaccgagtttttaacgctttttgtctgccgttttcttctgacagcgcagaataaaaaacttccttctaacggcccggccgcagtttaaagctgtctgtaaagagcagcttcaaaaaaatattcttatagtctttcagccgcagaaagctgtatattccggctttctgcgcaattcgaaataaatccatgatgagaagatagtattcaaaataaaaatggaagcggctcatgcattccggtttgaccaccaggtgcatgaagtcccatttttcataattttccgtggtgagccggtcgcggtattcattaaagagcggcgtccccggtatgggtgtaaagatggaaactcccgtataagtgatccggtgtgcatgaataaaccgccgcatattgcggaaatcctcttttttaaaacggctgtcgatgataaaaagccccaccagattgatgccgtatttatgaagaatccggatggtctgtatattgagggcctgcgaggaatgcttctggtaggaatccagaaagctgtcggaaaccgcctccaaaccgaccatgatgtagcggaagccggcttctgccagctcccggatcagggattcgtgggcggcaatgaaatcggatcgtccgtagcagataaaggtttttttgatattccgttcccggagcagccggataaaggttttgagccttggaacatcgaataaaaagtcgtcatcggcaatctggatgtgatcgcaggggatggtctccagctcctcaatgaccgcttctaaatccctctggcagtaggtaccgcagttgagctggcggccgtaacagaaggcacagtggaagggacaggacgatgaggtctttaagagggcgacaggggagacgtctaagtagcggtaatggctctgataacgggaaaatgtcgtgcggtccggaattggcagtttgttgatatcaaacggtttcatgggatttttgcgccagaggctcttattccgtgagactgcgccattttgtgccgtgccgttttccgggaggcagctctgtacctgatagcagagtccgtcaatggaggacagttccgggggacaggagccatttttgagcggaatgatcccttctgccatcaaaacatcagcaatcgcgtagatattgtcggaacggcatatgtatgacaccgccggatcgaagaaacgttccggattcagctgtgcatgtgagccgcccaccatggtgatgcagccgggacacagctcctttgcgcgccggacgtaggagagcataatgttttcctgagtgatataacggtgacagcaaccgcatcgggggtgtactccctgaaaacttcatcaaaactgcgcctgtcgaaggatgcctcatagatgatgctctccacatcaaattccttcagcatggcttttatatactccagttccagaggctccgtcttaagagccatatccaggctgaatccgctgcctgcggcttccggttttaccagcagaatcatatgacacctccctgttatgagcagccagcgttcgctgcgttcaaatgcgctgttatctgataaaattatatggtagaataagaaaaaaggcaagaaaggaaccgtgatggaatacttatatgttctgctcctctacctcccttccggttttggccgcctgacacagaaggcgacggggtaccggtacacccatgtggcggtatcgctggatgatacgtatactcatttttacgcattttccaggctgcgggccaggacgccgcccatatccggatatatcgaggagaagaggatctattatacgctgggagaggatgtgcccatctacacaaagattttccgggtaccggtctcgagggcgggatatgaaaacgccatacgattcatggaagacgtgaagcatgatcctgagatcatgtataatctgatccatatgctgctgatcccccttttcggcggccatccgctttacaaggcatacaactgcggggagtttgttgccagagtgctggaggaggcggggatcacgctccacaagccgtattaccggtatacacccaaactcttttccgaactgctggagccgtatgttctgtttgaaggaactttggataactccagccgtgagggcctggaagacgattttttccgggaaactcccaaaaaagagtatcttgcaaagactttatatattatccgggagctgcttttccgccaggtctttcaccgtgcatcgaaacggtttcagcctgaaaaagtccgcttttccgacagcggtaaactgtgagattatacagaaggaagaaacgggatttctgataatagccggaacctgtcagataatggaaaatcgtatatacgaatgaaaatcgcatatcagaaaatgacagaatttgaaagcactttcataaaattgtactgaaaaaagagcgaatttttgccagtaaatcaagaaaacccctttactagaaattgaattatgctataatattgacaggtctttcgcgcgcttttttcttacggcgtgaaagcgaaccgataactttatttgaggaggaaatacttatggcaacaaaatgggtttatttgttcaaagaaggcagagccgacatgaagaacctgttaggcggtaagggagctaacttagcagagatgactaatttaggcctgccgattccacagggctttactgtaacgacagaggcttgtacagactattataacagcggcaagaagattacggatgagattcagggacagatttttgacgctctgaagacattagaggaaatccagggcaagaaattcggtgataccgaagatccgttattagtatctgtacgttccggcgcaagagcatccatgcctggtatgatggataccatcttaaacctgggactgaacgacgttgcagtggaaggatttgccaagaagacaggcaacccaagatttgcatacgattcttacagaagatttatccagatgttctccgatgttgttatggagatgagcaagactttcttcgagggcatccttgatgaagttaaggaatctaagggagctaagtacgatacagacttaactgctgatgatttaaaggaagttatcgcaaaatacaaatctatttataaagagaaaatgggcgaggaattcccgcaggatccgaaggttcagctgatggaagctgttaaggctgttttccgttcctgggacaaccctcgtgcgatcgtttacagacgtatgaacgatatccccggcgactggggtaccgctgtaaacgtacaggccatggtattcggcaacatgggcaatacctccggtacaggcgttgcatttacacgtaacccatcgactggtgagaacggcatctacggcgagtacttaatcaacgctcagggcgaggacgttgttgccggtatccgtacaccgcagccgatcacgaagctggctgaggatttaccggaatgctacaaagaattcatggcaatcgctcacaagctggaagaccattaccgcgatatgcaggatatggaattcacaatccaggaaggcaaattatacttcttacagacacgtaacggcaagagaactgctccggcagccatcaagattgcctgcgatttagtagacgaaggaaagattacaccacaggaagcagttttaagaatcgaagcaaaatccctcgatcagttactgcatccgacattcgacaccgctgcattaaaggcaggcgaagtgatcggttccgctcttccggcatctcctggtgctgcggctggtaaggtttacttcacagctgagggcgcaaaggctcatcatgaggcaggcgagagagtaatccttgttcgtcttgagacttctcctgaggatatcgaaggaatgcacgcagcagaaggtatcttaaccgttcgcggcggcatgacctcccatgcagcagtagttgcacgtggtatgggtaccgcatgcgtatccggctgcggcgagatcaagattgatgaagcagctaagtacttcgagcttggcggacataccatcaaggaaggcgattacatctccttagacggttccacaggtaagatttaccttggcgatatcgctactgtagaagctaccgtaagcggtgacttcggcagaatcatgggctgggctgatgagttcagaacactccatgtaagaacaaacgcggatactcctgcagatacattaaacgcagtgaagttaggcgcagaaggtatcggcctctgccgtaccgagcatatgttcttcgaagaagacagaattccgaagatcagaaagatgatcctttccgatacggttgaagcaagagaagaagcattaaatgaactgattccgttccagaagggcgattttaaggcaatgtacaaggctctggaaggcagaccaatgaccgttcgttacttagatccgccgttacatgagttccttccgacaaaggaagaggacatcgaagctttagctgctgacatgggattaaccgtagaagcgattaaagagaagtgtgcggacttacacgagttcaacccgatgatgggccacagaggatgccgtctggcagttacttatcctgagattgcgaagatgcagacaagagccgttatggaagctgccatcgaagtaaaagaagaagacggatacgacatcattcctgagatcatgatcccgctggtaggcgagaagaaggaattaaagtttgtaaaagatattgtagttgagactgcagaagcagttaaggcagagaaaggctctgacatccagtaccatatcggtaccatgatcgagatcccgagagctgcattgaccgctgacgctgttgctgaggaagcagagttcttctccttcggtaccaacgacttaacacagatgacattcggattctcccgtgatgatgcaggcaagttcttagactcctactacaaagctaagatctacgagtctgatccattcgcaagacttgaccagaccggcgttggacagcttgtgcagatggcggctgaaaagggcagaaagacaagacctgacatcaagcttggtatctgcggcgagcatggcggcgatccgtcctccatcgagttctgccatagggtaggcttaaactacgtatcctgttctccgttccgtgtgccgatcgcaagactggctgcggctcaggcggcgcttaataataaataatagttgaaactgctttaaatacgcgatttactgttactaagcaaaaaagagagcaaatcttttatgcaggcatcaagagaaaaccccaggagggcaagtcctggggttttcatttggattacagccgtttcacagacagcggattgcctgattcctgtttagtcacaatctgcatgttcacgtcccagcgcactcaacacgccctctgtcagcagggtgtgtatcagccttccgacttcgatgatcggaacttttcttccctcagccagccaatggctggcaatagcaatgactccggccagatagaattccagcacataaaccgctttctcatcattttccgaaatattgaaatgccgaagaagaaccggcatcatcgctgttttcacccgttgggtaaactttgtgctgtcgggattggtaagcagcatggccacatacttttctgtctcctcgtgaagactggagaaagagcaaataaaagaatcagcaaagtcgatctggtcaaaattcatgtctaccttctctctgatgttctcaattatctcgtcctcaagatatgtgagcagatcatttacatccctgaaatactggtaaaaggtgcttctgttatatccggctctcctgacgatttcctgaacggttattttttcaatcggggtatgcagatagagagagcaaaaggcatcaacaaaggtttttctggtggcagatgtaatttcaggctgttttttcatataggtaactcctttacaatccgacaataacgccttatctgttggttgattgggcggcggaaaaatggtatattttaatcatacaacagttgtcggaatatatcaatgtttatatgaactccaatcacacattcctcaaaccggggaaaaggaaggaaaaaaggatggatacgtattcaagcattttcacccgtgcatcaacccgtaaatttgactcggcaccgctttctgcccaggcactggaagactttgagacatttatcacaggtgtgaagccgctggttcctgaagtgaagctcacccataaaattgtgggggcagacggcgtgaaaggattggcgcttcctaaagcaccccattacctgcttatatcagggagggaacatccgctacggaatacagcggcgggcttctgcttccagcaggcggaactgtacctctattccagggggtatgccactcgctggcttaacagcgtcagcccccgtcagcctgacccgaattttatcatcggcatcgctctgggaaagccgtctgagccggcagtgagagagccgggcgactttgaccgcaggtcgctggaggatatttccagtggcacagactcacggcttgaggcagcccgcctggccccgtcgggtatgaacggacagccgtggtattttgtcgcatccggaggcgtgattcacgtctattacaggccgagtctcggggggattaagggaagactctatcaccttaccgatttagatgtaggaattgcgcttgcccatttgaaagcagcaggggaccatgagggaaaatcattccgctttacggtaaaccaaagcagtgctccaacgcctccgaaagggtttgcctatgtggggacggtggaatagcaaataaaaataatgacagagaaggagatttaagatggaaaccatgaaagcgattgcaaagagaaagtcaaccagagcgtttatgccggatcaggcagttgcagaaccagagctggatgcgattcttgcagccgggtgcgcggcccctgtaggagccggcgattattcgtcacttcacctgacagtcgtccagaaccctgaaactctcagtaaaatcagtgaggcagtcaaagaggccttccatatggaccgcgacgttctgtacggtgcgcctgtccttgtactggtatcgtcttcggaaccgaagtttcccaatatccagtatgcaaacgtgggctgtgttatggagaatatgctgctggctgccacggatttaggcgtagataacatctatctctggggagcggttaacgtgatcgcaaacatgccggagctgcaaaaagaacttggaattcccgagggatttactccgatttcaggtgcggccctcggatatgcggcagaagacagtcaggctgaaaagaaactggagattacgctcgctatcaattatgcgccgtgaccgcggctttttgccgcttcgcatatggagagaatacaggaaatggcatgagaactgggatgagttatgcagccaatgcgggctgtgctgctatacccgttccgtcacacgcaggggagaggtcagaattaattttgcctctccctgcgagtttctcgatgagaaaacgcatttgtgccgcgtatatgaaagccgtttccgcagatgcccgacctgtcagaaggtaaatttgtttcgggctctgtttcatccctcgctgccgcctgaatgcgcgtatggaaagacctttcggctatggaagtaaccggggcattctgcttcagcggtggccgtcagatatcctcctgccccggtgcagaagaaaactgggaaggcgtgatcccttcatatttcttgaacagctggctgaaatactgcgggttgtcgcccaggccgatctctgcggcaatatccgtcatcttcatctccggaaaatgagtgagcagttcacgggcgcgcttcatgcgcaggtgagttagtctgaccagaatttattgaacctgattcatattaaggacagggatgatacttcgacagcagcatatttcatggatatgttcgaagatatgtttatcaatttggaaaagtaagactgcaaaacctcaggacgatcctgaggttttgttttttaatatcgcggcaaaaaaatgcccattcgcggccacataacgccgccccctcctcaaaccgctataataaaaccatcaaataacagagcagccggtatcttaaaacacagagcaaggtctttcaccagcttagtggacgtggtacaatagcagatacggaatatcacagtagaaagcccggcagcaggattatattccggaaaggaacggcggtatatgtacgaactcaaagataagaaaaaagaaggaacccgaaagcccatatggaagaaagcggcggcgtgtgtcatggcgctgatcctgtttttcatctgttctgccatgctttatgtgacgaagctggcttccaccatacagaagatcccggatgcggatatcaaggaaatcaaaaatgataatctgaaagaagagacggaagaaaagatgggcggctattggaccgtggccattttcggcgtagacagccgtgacggaaacttaggcaggggaaccaacgctgatacacagatggtcctgactgtaaaacgggacagcggagaaatccggctggcgtcggtttaccgggatacgctgctgatgagcaacgtggccgaaggcaaatgcagaaagattaactccagctatgcagagggcggaccggagcaggcagtcacggcactgaatgagaatctggatttagatatcatggactacgtatcattttcctggtcggcggcggcagatgcagtcaaccttctgggcgggatcgacatggatattacaaaggcggaatatgcctacatcaactcgtttattacagagaccgtggaacgtaccggaatcccttcggtccatttaaccggccctggactgacccatttagacggagtccaggcggtggcttactgcaggctgcgcctgatggacacggatatgcagaggacggagaggcagagaaaggtgatggaggcggttctggaaaaactgaaaaccgcggatttggccacgatcaaccgtctgcttgagacggtgctgccgcaggtttccacaagcataaccatggcggacggcctctctctgggaaagaacgccgggaagtaccatatggtaaaaacggagggattcccacaggagtatggaacggccaccattggaaaactgggccactgtgtgattcccaatacactggagaccaatgtggccgggcttcataaattcctgtatgaggatgaggattaccagatatcggaccgggtgagagaaatcggcagggaaattgtgaaacaggcagtgggagagtgaggtgatgatacagttggtacggatagcggtttgtgatgacgagcccgcatttgcggagcgggtaaaaatactgattgaagcggaatgccgcggactgggcgtttcggcggaggtttccctctatacagacagtggtatgctggcatacgatatcggagaaaagaggtattttgacatgctttttctcgatattgagatgccggggctttccggcatggagctggcggatctcatcaaagattcactgccacaggcactcgtttcctttataacctcccatacaaagtatgcggtgaagtcttttgaactctctattttccggtatattcccaaggcggaggtggaaaactgcctccccatggcggtttcggatgggatccggctgctctcctggaaagtgaaggagtgctacgtggtggagacgccgcgccagatcataaaggtggcggtgagcgatatcctttatatttataaaaaacagaagtactctgttatggttctggaggacggggagatcccggtacggaaagctctggggcagctgaaagaggaactggacagggaggaattcctgatgatcgagaggggctatgtgatcaacttgtatcatgtatggaaaatggagggcacatcggtggttcttgacaataaaaccgtgctcccggtgagccagaatcatgcgaaagaagtgagagagaccatcaccggtttcttccggaggcatttatgaataccatattcaagctttgcgaactggcagcctattttttcgaggctctgatctgttacttttttatccagctgttttttcctgaaaaggctaaagggaagatccgcttttttctgctgtccggcgtgctgctggtgactgttttcattgcggattccctgcatgttttcccgtttctcgttaccctgtggtttgtgttctatatctgcatgacgacggtgcttatcttccatgtagatgtgttttatgccgtttccctggtgagcttctatattctgtgcgtctatattattgattttttctgtatctccgtgatgggcgtattcttaaaaaaccagcagtttgcccagatggtgatcgcccagctgtcgcagtggcggctggtgtatcaggcggcggataaactgctgctgactgcagcgtattttctggcgaggaaggcatttcgcaggaaactggcctacaatccgggaatgctgtttttgacatccggactgggattatgcggcgtcgggttcctgtcgtggcttaccattcaggagacgagcctccatgcgctgtttgggtggagtatgtgtattattctgctgtttctcatctattttctcctgctgttttactcgaaatatgtagaggaacagaagcagcgtcttgcgctggagatgaaagagcagatgatcgacagggagtacgatttgatggtgcggcagcagagggagcaggaggaactgtcccacgatatgaaaaatcatctgcttgtgctttcttccatgattggtgagggaaagcttgaagaggcggagatgtatctggagcagatgggagagccgctgcgtcagttggagatgatggtgtggactggcgatcccgttctggatgtgctgctgaataatgccagaagcagcgcgataaaaaagaaaatccgttttaccattcaggcggacgccctgacgctgggagatatggaagaccgggagaagtgcagcttattttccaacctgctggataacgctgtggaggcggctgatcaagtggaggcaggggaacgctggattgccgttaagatacggagaacgggagaaatggtattcattgagctgtccaattccatggccggagcgccttccgttaaagataaccgtctgattacaacgaaacggcagggaaccggccatgggctgggattaaagagcgcagagcgggtggtggaaaaatacggtggaagcctggtctgcgagtatggggatgacgtttttactgtgttagtaagctttttaggtggttttccagaacttccatgatccggctgtcttcccaggaggcaccgtggccgccgagtttaatggagggcttgtgttttccgtgaaaatcgctgccgcaggtgatgagcagacgatttttcactgcgacattcacatagtgagcagaggtttcctcattgtgatacgaggagaatgcttctattccgtcaacctcccgaaaaaggatgctgttcagcagttctgtctcactgaggtccaggttctgaccgggatgggccagtacggcgatgcctccggcgtcatggatcagcgataccgcatcagccagggatatatagcggacaggcacgtaagcgggttttccttctgagaaaaaatcccagtaaaaccgcacattcggcatatcgctttttgctccgccggacagataggggcggagcagttcatattgtccagcctcttcttttgagaggagaatttccgcaatcaattcgccgggaacaactccgtctgcagcggcggccatgacttccccctcgtctaccggtatgccggttgcgctctggaataagcggattttttctctggccgcggttttttcctgatccagaatttcctgctcgatctgtgcaaattctttgcgggtatgatcgaagccgtatccgagaagatggaaattccggcctttatgagtgcagtctaactccactccggagaggacgagaagaccgcaggaggaagctgtggactgggctgccgtgacgctgcgaaccgagttgtggtctgtaactgcgatcagctccatgccctgggccgtgcacattgccacaagttcctgcggtgtatattccccgtcgtcactggcggctgagtggatatgtaaatcaatctttgacatggttagtctcctttcgggaatagaagtaaatgaactgtaaaagcaggattcccgcggtggatatcaggtatagaatccggatgccggtaaatcctgcggcacctgctgccgcggtgcgggcatcgatcatgcctttgacggcgcctcctgtcagagggccgagaatggaaccgaggccgatggctgccgtataaaaattgtcgtagacaatgcggttatcctcgggcatcagctcatatctccggttaaatacggatatcacaaaaccggcatttgcggccgaggatatgagaaatgcagccggaatgaaaatgaaccagttctgagcggaggcaaaggacagaaacagggtttcaccggcaaagaaccagatagacatttttaaggtgaattcatggccgtaacggtcactcaaccttccccagaaactgagcagaatgatctgaggcagagagatcatcatgtataagccggtcacaatctgatagggcagcgccagatatttcatcatgaagaccatggtatagctgtcggaaatggtaagcagcagataaaagataaatatgtaagcaacaaagcctgtaaaacagcggtttttgagaggcagccgggcaatgtcccaaaatcggcagcttctgcctgaggactggtacggttccccgtcgggtgttgcagccagcagaatcacttccaggattcccatcagggctgcggcggcaaacaggagggcgaagccggcgtattttccttccatgagatccatgaaccggcccccggccagagaaagcaccacggtgacggtcagcgtcagtgtctgtcttaaggaaatgtaccgtccgctctttttctcttcgataaatccaagcatccactggttaagcaccaccgtggtctgtgcctgaagtgcgaaggcagcgacgacggtggggacaaacacataaagccggattccggccggaaagagcaccggtatggtcacgataaaaagcgttgccaggcgggagaggattgtaagtgctatggtcagttttttccggctggtaaaccgctccagaaatgccggaaacgcgagaatcagcacgccgcagatattgacgattacacttaaataactgaccagaatatcaccggctcccataagaatcgcgaggccgcttaagaaaacgccgctggtcagatacgtaaacgccgtgccgaatccggcctgaatgaaaaagcaggtccgaccacttctgccaggcagacccggtcctgcgggcccggagctcatggctgctcctttataaactgaacgtcgtcaaagatcttaccggctgtcaaagacgccatgccgtcgtggtagtcatgccacatatcggccgagtacaggatctccgcggtcatatgttttggaagaagcgcagaaaatccgtcgcttatggggccgatgcagtccgttcgcaggtccggaccgcccagaacgacatactgcgggtttaagatgccgcagatccagctgatgatccgtatcatcagatcggtgtaatccttatcgtccagtgcactcatcagccattcatccagaattcgtccatcctccatgggaatcagccccagctctccagcaaagttgcgaaagccgcggacgatccgtcctcctacgataaaaccggcgctgacacacgttttttccagatggagatacgccatattcgcacgctccggggactcgcgggggaattcctttgcataacagcgcccgaagccgatggctgtggcatttaagtcgttctccatgacaacaggtatgtgataccgttcggcgaggcggtcacctaagtcataacggcataattcgtcgctgcctccggttccctgccagaaagcgccgccttccacgatgcccggaacgccgatccctatggactttatatccttgcgcgccataagttcgtcgagaaatgcacagatggccggttcgtaatcgctgcctgtaaactccagtctgacagtctctaaaatctccccgcagattccaacaagcagtccgtgcatgtcactgcccgagatgcagatcgccgcgccatagtacttatccggcttgaagcggtagcgttctgctttacggcctccgctggatttatcgtgtccaatgctttcgatctcgccgttttccatcatctctgcaaggagagagcggactgtcgtagaactgatctgtgtctcaccggcgatttccgccctggttgaggtgcctctgcgtttgattactctgcggatctgtgagagattcgcctgctttaagagccgtggtctggcggttaatgtgtccataaaaacgcctccttgtcacttttgttggaaacttttataagtttataacaaaagtatatgcgagaatgacagaaatgtcaatagaggagaagacagaatgacaaatcccttccgaattaccgttaccattcacggccccgctgaaagtttccgccggcgttccggtgcgtgggaggggcagcagaaggaagcgtttcttgtttcctcggtggcaggaactaaagcagaaagacgggaaaaaggggcggatcgtgcaaactacggtgaactcctgaaggacttcacctccgtgtccacttgaaatctggcttggaggccagatttcaccacctctttttcccgtctttctgcttaagctcctgcgaacctcggaaaaggaaacgctaccttctgctgcccctcccacgcaccggaacgccggcggaaactttcagcgggccgtgaatggtaacgaattaccacataaatggcggaagggatttgtttcattctatgatgtggaactgccggtatctttttgaaaatctgcaatacttttcgatcgggcggctaacttcagccaggctgtcaggacatttacgtctttttgtaaaatgattctctcacgaagagcgtcaggaacagggcctaattcagaaagcagttctataatgcttctttcgatgcccctttcaatgcctcgttcaatccccaattgctctctctgttccagtttgtcagcaaaaagttcttccagtgcgttacacaaatcgcatccctccttatattttttccaatttgctcttatgactaaatccatggcagcctcgtagaccgggtcctgttccttccctttataagcttttgccagaggctcgatatccttttgtatctctaaatcagagcgcagacggctgagccatatggtttcctcaggtgaaagctgatggataattaacagctgaactttgaacagcagtttggatatgtaatagattccggggaattcttctgtaatctcactgccatatgtctcccttaaaaacttaatcagcttacccggatactgattgacaaccagcgttatggtgatctcggaaggcaggattttcacttcccgttccgcagctgcctgataaagacaggcgtaaccatttactttaaaaaaatcattgatcccgaacgaaacttcaggattcttatattctacgatattataccggctgaaaatgcgtccgaaacttttttcgatttttctaccggactccttgatgattaaagtatcaatctgaagaggttttctgtcagattaaactcctcatgaaactgcagatactctttctcagcctccaattcaatctgcagcacggcctgaaatgccggatgccattgtaacggtttgtgctccatacagttctccttttattatataaaaagtttgagtgaacagcaataggcattcataggcatttcctcccttctgcattttttttgagtttttggcgcaagattacaacctggccgctgccaggggtgaacgcatatacttgaccggttatctggaagtttgaccgaaacggtctgttgtcgtacttcatgtacgagagattgtccgaaggactatgagaaatcagtactgtcaggagattgacagaatatgaatacagatgtggtaattataacataaatttttggtaatgtcttgtagtaaatttatattaggaaatcataaaaaatgggagggaaactccaaatggtttctgttccccctcccatcactggaaacactgggatattacgttctaaatttcaattaccttcccatcagaaagcctggactcctccgcggcaaatgccacaagatggctgttaatcgactgctccagcgaggtaatcccctccggttcctttcctgtctgaagcatgtcaaggaattcttccaccatgcggttgtcgcctcctgcgtggccgctgaagtcctcggccaactgggagatatcgatgatctggcgaggctttccgaagagtccaacctcgatggtattcttgtacatgtcacctgtgagatcgccttttgtccccatgatcttgcagtaacgggaagcgccgtcgctggtgaagccgctcatggtgaagtttatggtgcttccgtcggtgttttcgatgttggtcacctgatggtccaccacattgttgtcacagtggtagacacagcggccgtacgggcctgtctttatggcatcatagatcgtctccggagtcggctggagagccaatacatccaccggccattcggtgtggccgcaggcaatgccggtcttttcgtttgtaacgtagattttttctgcgtcgaaggggcaggagtcctttgcggcacagccgtcgagacagcggagcgcggagccttcgggggcgcaggattctttaaagagccaggtgtttcccatggaagaaacacggagcggcgtcttgtcagccagccatagatagaggtcgaaatcgtggcatgtcttctgaaggcacatggggctggtcgtctcactgtttctccagttaccgcggacaaagctgtgggcctgatgccagtagcccacattttcaatggcctggatcgtgaccacatctccgatgatgccggaggcaattaactccttcatcctggaaaagaacggcgtatagcggagtacgtgacagacaacgattttccggtcatattttttggaagcctccagcagccggcggcattcagagggatcgggggagatgggtttttccattaatatgtggtatcctctttccagggcggtaagcgcctgggagacgtggtcgcggtcctgagtgcagataaagacggcgtcagccatcttaggctgggccagcagctcctctgcgctggtaaaacagcgctcctccggaatgtggtacgtcttcgcagtctcccggagggctccgggatcgatatctgcggctgcggtaatctccattttgtccggatggagcgacgcaaacggcgcataggtgattcttccccggcttccaaggccggcgatggctacggttgttttcatgtgatgtcctcctgttttcttatgaattgattgtatgaatcctcatggttacggtggtgcggtgattttccggttccgattcaatcgtaagctccgacgacttttcaaaatagagcttgatccgcttgtagagattggccagcccgtagcttttggagacggagcctaccggattcgtatttttaaatgattccaggattcgttccatggttgctctgtcgatacccggtccgttgtctgtaacggatatgacacagccgtcgccgctttccgcaatgcgtacgacgatgtgaaccggcgacgaggtggtttctaccgcgtatttcatagaattttccaccagcgggtgaattaacagcttgggaatctgcatggagcggacttccggttccacctggtattcccaggtcagacggtctccgaaccggaacttttccacctgcaggtactgttctacaaaggtcagctcctgttcaatggtgatacggtcgctctcctttaaaatgtactggaacagcttggccatggccatgagaataccggcattgtccatatcgtttttctggatcagactccagtagaccgattccagggcattgatgatgaaatgagggttgacctgggactgaagcgcggtgatttccgccttggtccgcaaaagttctttttcaaatacctgctcgattaaacgattattcttttccaccagagcattgtagtggatattcaattcattgatgtcggagttggagtaatgtctgtcattggcctgcagctttccgtctgcgattaccatggattttctcatgtcggacagcggttttgaaatcatacgtgcaataaagaggctgcagattaaaaatactccggtgccaataagaaaaccgcagatcacaatgccgctcatccaggagatatcattggaggtcagttccttcggaatatagatggaaaaggtccagccggaatacggcgatgtggagtcggccagctgataattccggtcgaaggaatccggattcatgtcctttaaggtcttcccgtaggagacgcgggtgccggcgcagtcggtcaattccagtgtgcagtcgcccagggcgtttaggtcctgggcaatagaatccattaaatccggttttaaatgaaccacaacgtatccgccgtgctcaaacgcgtagtccgccagaagaatccgtttgacggccatgatggtatgactgccttctgattcagaatcggacagcagccatacggcctttccattatattcgtcggccatggcgagagcggattccgggatggcggtggttaacggttcttttgtgtacggatagatctgtgcttttttgctgtaaagctcgatggattccagattatccgcgtagttgattgtattcatggtctttaaacgaagcgtggaaaaattttctgaggaaaacgaagcattgtgattgtagtcgtttaaaatggtctgaaccgccagatcattgcagaaccgctgaatgccggaatccatctcagtcagtgaggagttaaaacgctcctgagcctgtttgacagtagtctcaatgtatttggaagactgctgcagaatgtaaccggacatattcttatataagtaaccgccgatacagagaaaggcgataaccataaccagcatggatgaaataaaaatctgccccgacgtggtgtttcccaataatttcagcttttgtttcatgacgcctccggtatgattagaatggtaaattacatggaataactttcgtacagcttcatcatatcaaattcatatggtaaaatcaaaagatatgcagcaagaggagaaaatagtggaattttacaaaaaaatagtgtggtttctttctttgttgtctattatatactaaatatatcttcaaacaccgttcctttaagctcgtgaaataccttgtcatgcccgatgatacgaagcacatggagcggagattacatggatcgcacggaaacggccccgggacgtccgctatgcacgacgaaacggggatcgctgagtgctcataaaaaggaggaatttaacagatgaaaaagagagcagcagcattattctgcgcagcggcactggggattacatcactcaccggatgtgcagcaggaaagcaggaggccacagcagcaggtacagagacgaccgcagcagtgtccggggagaagccggcagcagaagagagtaagagtgagacggcaggagaaacagcggccgggcaggaagcagcagagattacgtactgggatacggtcggcagcgtgtcggaccgcgaggccaagctggccatgatcgagcggttcgaagcacagaatccgggaattacggtaaagtatgagggaatggaaggagaggcctacaagacaaagattaagactgtggtaagcgccaacaacctgcctgatatctttggatactgggtgggagaacagttcaagactcttgtgaactccgggaatgtggaagatttatcctctgtctttgaggaagatacggcattccgtgatacattcgtaccgggcagcttagacgcagtctcctatgacggtaaggtttacggcgcgccgacctccattacctgtatggcagtctggtacaacaaagccatctttgaggagaacggagtggaagtgccgaagacctatgaggaactgaagggcgtaattgacacactgtccgacaatggagtgactcctattatcgtgggagccaaggaccgctggccgcttctcggctggtactcctaccttgcacagagaatcggtggcgtcgatctgtacaatgaggtgtgcaccggagataaaaactttacggaagacgcatatgtacaggccggcgaggaaatcaagactctggcaaagaagggctttatcaatggctgtatgtccgtagacgctacgacggcggaagcactgtttgcggccggcaagggcgcgattctgatcaccggttcctggtcgattccgacatttacggaagacccggagcgcgcaaaggatttctcttattttccattcccgatggtggagggcggaaaagaggatgaggccggttacttatacggcggtgtcgccaatacgctggcagtgagcaaatctgcaaagaataaggatgcggtcgtaaaattcttaaaatatatgatgagcgaggaagaacagaccgtaaacgtagagcgtacaggaaccttctcaaccgtaaaggtatcaccgaaggaagagaacatggatccgctggcttaccagttcagccagtacgtatccgacggtgtggagggctttattccgtatacggatcaggccctgcctccggaacaggcggagaatttattgaatgcattaacggccattgtagcagaagacaacgccgatgtgaaggcagagcttgcaaagatcaaatagaaattacagagtgaaattatcaaataggaagtggggctgcgcacggtgcatgaaccggttgcgcggccccgaaaggaataggtgcagagtatgagaaaaatacatcctgcggtgcggtgcctctttatattgcctgcggtcctgtggttttttgcggcggtgatcgtgccggtcttgatggcggtctattacagctttttcagctgggatggcgtgactgccagggtgtttatccgcttcgataattacagggaactgtttcgggacccggtcgtctggaagtcccttaccaactccctgaagatggccttctggtgcgtactgcttcagctgcccatcggcatggcgttttctgtcattctgtttaaccggaagctaaagggacggggatttttccgaaccgtgtacttccttcccgtagtgctgtcctcctccatgatcggtattttatgggggcagatctacgatcccaacttcggccttttaaacggtcttctggaggcggtgggattgaaacagctgcagcagatctggctgggagatatgaaactggcgctgggctgtattatcgccgttgtggtctggcagtttatcggcaactatattctgatttactatacggctctgcacaatatttccgaggatgtgctggagtccgccaggctggatggtgccggggtgtggaagctgttccgctacatcgaactgcctctgatgtggccggtgatccgtctgaccctgattctggctacggttaattccttaaaatatttcgacttagtctacatcatgtcaaacggaggacctaaccatgccagcgaggttctggcttcctacgtggtaaagaacgcgttcaattccatgagaatcggctatgcgaacacggtggcagtgcttctgctggtgctgggaatcttctttatcatactctataacaggatcctggctccgtcatcagccggcgattaatattaccgaaggagaggtttccatatgaataaacgcagtatatcacccggtaaaataattttgtacctcattctggcggttcaggctatggttaccatgtatcccttagtctggatgattgtgtcctccttaaaggacaatgtatctttttttgcagacccgtggtccattccaaaaaatccccagtttgtcaattatgtgacagcctggaaagagggaatccaggactatatggtaaacagcattgtgatcaccatcgcaacgctttttatcgtcattattttaagctgtgcgttctcctttatggtcgctcgttttccgtttaaaggggccgggcttctggtaggaatgttttttgccgggatgatgattccggtccactgtaccctggttccgctctacagcatgatgaacggactgggatggctggacagcttatgggccctgctctttccctatgtggcgtcgggactgccgctggccattttcctgacctacggccactatcagcagatcccgatggagcttgaggaggcggcgagaatggacggatgtggtgtgatccggatgttcctctacatctttcttccgctggcgaagccggtgatttccaccatcgggatcctgacggcgatcagcgtgtggaacgaatttatatttgccaatatcatcatttcagacccggtgaagaagacgctgccggtaggacttctggcgttaaaggggacgtataatacgaactatgctgcggtcagcgcggcgttgactatttccgcgataccgattatcatagtctatatcctgatgtccggaaagattcaggccgggatggtttccggcgcggtgaagagttaagtgggggagagaatggataatcaaatgaaaaactgtcttgaaaatcctgttttacccggatttcatccggatccgtcggtcatacgggtgggagaggattactatatggccgtgtctacctttgaatggtttccgggagtctgtatttaccattccacagatttacagaactgggaactggcggccagaccgttaaatcgtgtttcccagctggacatgaagggcaatgacgcctccggaggtgtatttgctccctgcctttcctatgccgacggcgtgttctatctggtctacaccaatgtgaggacccactggtacgactttatggactgccacaattaactggttacggctgcggatatccggggagaatggtcagaacccgtctatctgcacagcctgggcttcgatccgtctctgtttcatgatgaggacgggagaaagtgggtagtcagtatcgtgagacattaccggaagaaccgcgttcagaggattgccctgcaggaatacgaccctgttttaaagaaaatgacagggcctttaagggagatattcgagggcagcgggctgacggctccggaggggcctcacctttaccggagaaacggctgttattatattatgacggcggaaggcggaacagaatatggtcacgcggttaccatgggccggtcggagaagattggcggtccctatgagttatcaccttataatccggtactgacagcgagacataatatgacacttcctttacagaaggccggccatgccgatctggtggaggcaccggatggggagtggtatatggtgcatttatgcggccggcctctgccgccgtttcgccggtgtattctcgggagagagacggctgtccagcatgtgaaatggacggaggacggatggctctgccttgcagacggagggaatgaaccgcgtttacgcgtcccggtatcatggccggtgaaacgaaaaagggagcaggagttccggtattcctttcaggaaacagagttaagcccggatttcttttcgctcagagtgcctctgggggagtctgtgtcactgaccgaacgtcccgggtacctgcggctgacgggaaaagattcgccgaattccagattcgaacagagtctgattgcacggagacaggaggacttcgatttcagttttgagacagagctggaatttgagccgtcctcggagcggcagatggcagggattctgtatttttatgacgaatgcgacttttattaccttcgtgtgacgtacagccaggatgggcagaagattgtcgatgtgatgcggatgaaccggggaaaggctgagtatacgcctgactgcggtatcccggtgcctgagggtcggagcatccggctccggctggaggtgcaccggacggaggcctgtttttcctacagtctggaggagggcgtgtggcagcaggcaggagatacgctggatgcctcgctcctctctgacgagtacccggaggagggagcgtacacaggagccatggtcggtctggggtgtcacgatatggcgtaccgcagtgcaaaagcgtattttaagtatgcagtgtaccgcagggaagggaacggaatggaaagaggctgatggagactgacggagagggggagaccatggaacggacctatacattaatgctggtagaggatgaacggaatattctgtacggcatgaagaatgccatcctctgccataatgctctcgtctcagagatcctgactgctgaaaacggcagggaggctctggaacttctggaggagcgggttccggatatcatcattaccgatatccgtatgcctgaaattgacggtaccgagctggtccgccggatccgtgaacaggggtatgagatgcccgtgatcatactgacggctctgacagactttgcgattgcccgtgatctgatccattatcaaattcagaattacatcgtaaagcccttctcgattgaggaaattttaaaggagacggaggtggcgatcggagagctgaagaagcgcagtcagatgaagatggcacagaagatcgtgaaggagttcccggaactggtggagatcccgccttccagcgaaaaccttctgatttcccaggccgtggagtacatcggcagtcatttggccggcgctgcttcattaaatgacatttccggggcactccatgtgagtaaggcatatttatccacgctgttcaagcgggagatgaacaccactgtgacggattttgtgacgaagcagcggatgaaagaggcaaaaaagctccttctggagaccgatatgctggtatctgagatctatttgaaggtagggtaccagagcgataagtattttatcaaggtgtttaaggagctggaggggatcacgccgctggcctacaggaagaaatggaaggcagaatgaacagcagtagtgttgtttttgcggatgaatctggaagattgtaaaaaaaataacaaaagaaatgaaatggaatattgactatttcgagtaaatgtaataaagtaagtattagcctatggcatgtaacttacaaggtataagtaacatcaaataaactatttggttactatacaatattacagaaaagagaggttgaataaaatggcagaaatcgatttaagtcagtatggtatcaacggaactacagagatcgtctacaacccttcatttgaaacattatttgaagaagagacgaaaccagaactggaaggctatgaaaaaggccaggtaagtgaactcggcgcagttaatgttatgaccggtatttatacaggacgttcacctaaagataagtacatagtcatggatgagaattctaaggacactgtatggtggacttctgatgagtataagaacgacaatcacccggccagccaggaagcatgggataccgttaagaagatcgctctggaagagctttccggaaaaagactttttgttgtagatgcattctgcggtgcaaacaaggatacccgtatggcaatccgtttcatcgttgaggttgcatggcaggctcatttcgtaaagaacatgtttattcagcctacagccgaagaacttgagaactttacaccggatttcgtagtatataatgcttccaaagcaaaagtagaaaattataaagaattaggtctgaattctgagacaacctctatgtttaatatcaccagccgcgagcaggtaatcgtaaatacatggtacggcggagagatgaagaagggtatgttctccatgatgaactactatctgccgttaaagggcattgcttccatgcactgttctgccaacacagacttaaacggcgagaataccgctatcttcttcggactttccggaacaggaaagacaacactgtccacagacccgaagcgtcttctgatcggtgatgacgagcatggctgggacgacaacggcgtattcaacttcgaaggcggctgctacgctaaggttatcaacctggataaagaatccgagccggatatctacaatgcaatcaagcgcaacgcgctgttagagaacgttacccttgacaaagacggcaagatcgacttcgacgataagagcgtgacagagaatacacgtgtatcttacccgatcgaccatatcgagaagatcgttcgcccggtttccgcagctcctgcagcaaaagatgtaatcttcctgtcagcagatgcgttcggcgtacttcctccagtatcaatcctgacaccagagcagactcagtactacttcctgtctggatttacagcaaaacttgctggtacagagcgtggtatcacagagcctacacctacattctccgcttgcttcggccaggctttcttagagttgcacccgacaaagtatgcagaggagcttgttaagaagatggagaagagcggcgctaaggcttaccttgttaataccggatggaacggtaccggcaagcgtatctctatcaaggatacacgtggaatcatcgacgcgatcctggatggttctatcgcaagcgcaccgaccaagcagcttccatacttcaactttgagattccgacagagcttccgggcgtagatcctaagatccttgatcctcgtgatacctatgcagaagtttctgagtgggagacaaaggcaaaagatctgtctcagcgtttcatcaagaactttgcaaaatatgagggaaatgaagcaggaaaagctttagtttctgcaggtcctcagttataagagtaaaatgagttgttggcccccggcagtttttgccgggggtttttgatataggaatccggcgggatttcccgcgaaattgacaaagcggattgggggaaacatggagagtaacacaaaaattatcttttttgacatcgatggaacgctgattgatatgaagcgaaagcagatttccggcaagaccatggaaatgctgaaaaggctaaaagaaaagggcgtgatgatctgcattgctacgggcagagcgccttcagcgcttcccgcgtttggcgatattgcatttgatgtgtatctgacctttaacggatcgtattgctataatcgtgatcagaccatcttcagcaatccgctgctgaccgatgatgttggtaccattataaaaaacgcggagaccattcacaggcctttgtcacttgccacaaaagacagacaggcggcaaatggaaaggacgatgatcttgtggagtattatggttttgcaaaccgtgaagtggaggttgcggatgattttgaggaagtggcaaaagaggaagtataccagatcatgctgggatgccgtgaaagagaccatctttccctgctgaatggtgtgcaccgtgccaaaattgcagcctggtgggaccgggccgtggatattatccctgccgacggcggaaaaggcattgggattgaaaaggtactggaatattatcacttaaatcaatcagaggcgatggcctttggagatggaaacaatgatattgaaatgtttcaggcagttggaaaagggattgcaatggcaaatgcctcagacagactgaaagaagcagcgtatggtctctgcggtgacgcagaagaggatgggatctatcattattgtatggaacatggcctgatatgaacggaagctgtcacgacgatgcgggaaaatctctggattttcccgtaagctttctccggagatttgactccggacaggactttacatgtttaaggagaaattacactttattggatgggataagaataatataaaaatgaaattatacagaatgcataaaaatacccttgaatatgtcttgagaaatatcatattgctgtcaaaattttacaaaaaaaatattacctattgatttaaacgtgtaaacaaactataatgtgtccataggataacagtagttagttgaaagtggataatgcatactttttgaggaggtcgtgatttgaaatcttatgaagcaatggaagaagaagctctggcagtgcgcagagacattattgaaatgctttaccaggcgggaagcggtcatcccggcggttccctgtcggtgacggatattctggtgtgcctgtacaaccggatccgcgtggatgaaaagcagccggacatggaagaccgtgaccgggtggtactcagcaagggacatgcagcccccgcattgtatgccgtgctcgcggaacacggttttttttcaaaagatgcatttaaacgtttaagaaaactcggaggcatgcttcagggccatccggatatgaataagactccgggtgtcgatgtctgtaccggttccctgggacttggggtatcgaccgcctgcggaatcgcactggccggaaaggtgagaaagaaggactatcacgtctatgcgattctgggagacggggagctgcaggaaggcatcgtatgggaagccatgacggcggcggtccaccataagctggataacatgacagtgattgtggatttgaacggacttcagatcgacggtccggtggaaaaggtaatgggacttggtaatctaaagggaaaattcctggattacggttttaaggtggtggaagcggacggacatgattttgcggcgctggacgcggccattgcggtgagaaagaacggtgtgccggtctgcatactggcaaagacggttaagggaaaaggcgtttccttcatggagaaccaggccggatggcatggacagaaggtaagcggtgaagattataagaatgcaatggaagaactgaaaggaggaagatgagatggctgaaccggcaatgagagaggcttatggagacgccctgcttgagatgggggaggatgaacgcgtcgtagttctggatgcagacctggcgaaggccacatcctccggaaaatttgctgcgaagtatcccgaacggtttttcgatatgggaatcgcggagcagaatctgatgggaacggcggctggtatggcgatcagtggactgaagccatttgcatcgacctttgccctgtttgcggcgggccgtgcttatgagcctatccgcaatgcggtctgttatgcgaaggctccggtgaagatcgtggctacccatgcgggactttctccgaattccgatggaggaagccatgagacgatcgaggatatcgcgctgatgcgggtgctcccgggtatgacggttttgagcccgtgtgattacagacaggcgtttgatatggtgctgcagatgaaagatatggatcatcccgcttatatccggatgtcgagacacccggtggagacggtaacggctgagggaagccatacggagatcggcaagatcgacgtgctccgcgaaggcggggacgtatgcttcgcagctacgggggttatggtggcggaagcgctgcatgcggcggaggccctggaggaaaagggaatacacgccgcagtgttaaacgtacatacaatcaagccccttgaccgggagaccctgatccgttacggaaaatcctgcaaacggatggtaacggccgaggaacactccgtcatcgggggcttaggatcagcggtggcggaggtgcttgctgaatgcggcggctgccgtatgaaacgcgttggtattcaggataaattcggacagtccggtgatctgggagagctgatggagagctatggactgacggcagaaaatcttatggagaccgcattactgctttgtcactccacgtaagttcgtgaaagacctcactaagtggagatgacatgtatcgcacgtaagcggccaaaggacgtccgctaagtgctcataacaaggaggaagaacaatgaaaaagatcccggtaatcatagactgcgatacaggaatcgacgatatgatatccttcgccgtaacactcacctcggataagctcaacatcctggggatcacgacagtggccggaaatcagacggtggatatcacgacacagaatacattaaacggagttgcaatcatgggaagaaccgatattccggtagcgaaaggagcggaaaaaccgctgtcgagaccgcttcaggatgccggatacatacacggcgaaactggcctgggaacgtatcagttcgctgaaaaaacggtaaaacagccggagactgaggacgcggtggagctgatgagacgcctgctggccgcatcggaagagaaggtggtgattcttgcgattgcaccgctgaccaatgtagccagactgctgatggaccatccggaagcaggagagaagatcgataagatcgtgtttatgggcggttccttaagaaccggaaaccccacaccggtttccaccttcaatgtgctggcggatccggaagctgcgagatatgtgatgaagagcggtgttcccttccatatgtgtccgctggatacgaccagagaggtgtatctgaccgcagatgacattgaagccatcggagcgattggcaatccggttgcccggatgaactacgagatgtgccgtttttataacgatgccgtaaataagaacaacaacgcggacaaacggtttaaaggcctgtgtatccacgacctctgcgcggcggtgtacgtgacggatccacagctttttacaaccgtgaaatatcagggagatgtggagacggaaggggagctgactctgggatttacggttctggactacgaaaatatcagacaggtaccggaggaagagaggaacgtgacctttatcagttccgttgacagagacggcgttttgaagatctatttcgatgctctgaaatgctttggagaacagggggaagaaattcatggataaaataccggtaattatagactgcgatactggaattgatgatatgatatcatttgtactgacacttgcgtcgaaacagctggatatccggggagttaccaccgtggcgggaaatgtatcccttccgtacacgacgtataataccgtcaacggacttgcatttatgggcagaggtgagattccggtggcggccggagaagcagcgcccctggagcgtccgtaccgcgatgccagcgagattcacggggacagcgggctgggagcatttacctttgaacatcccgtggattacggtccggtggagaccgggggagtggcgtttttatatgaaaagctgatggaatcggaggagaagatcacgattctggcgctggcgccgcttaccaatattgcgaagctgtttctggagcatccggactgtaaggaaaagattgagaagatcgtatttatgggcggttccatttacagcggaaatccgacgccggtggcgacgtttaacgtgtgggtggatcccgaggcggcaaggatcgtcatgaagggcggcgttccattctatatgtgtccgctggatacgaccagggaagcttacctgacggaagaggagctggaaattgtcggaaccattgacaatccggtggcggatatggtctacaccatgttgagcttctactggaaccaggagaaaaagaatgtgaacggccataagcgctttaaaggattgtgcattcatgacttatgtacggcggcgtatgtgacgaacccggagctgtttcactctgcgaaatactacggagacgtggagacgaaaggaccgctcacggaaggctttaccatgattgactgtgaggacatcttaaggaagagcgaggatgagaagaacatcgactatattgattctgttgacagagatggtgtgataaagattttctttgaggcactgaattcttatggagcataaaaaagcggatcttcccaccgcaggggcgtgacagtcctaaggcggtgggcaaatggaatagataaaggagaagataaaaatgaaaaaaattatggcagcggtactggcgggagttatggcattttctttgacggcatgcggaggcggagcagcgaaagacgcaggcggcggtgaaaaggcagaaggaacagggggaaagacgtacaaggtcgcgctgatggcagacggcgccggtttcggttcccaaagcttcaacgacgttgcgctggaaggactggagaaggcgaaggctgacttcggaatcgagctgaccacactggaggtaaaggaagtagccgactttgcaaacagcttaagaagcttagcgcagcagggctgtgatctgatcattacccccagctctacgatcaaggatgccgtaacggaagtggcggcggaatatccggatacctttttcggtcttctggatgtccaggtagaaggcgtgccaaatgtggtttcatccagctaccgtgagcatgaggcggcatttttgctgggagcacttggcggatacttgacaaagaccaaccagatcggctttatcggcggcgtcagcggcgtgattcaggaccgtttccagtacggatatatggccggagcatggtattccaatccggaagtcaaggtaacctcctcctataccggaagcttcagcgacgtgggtaagggaaaagagattgcaaccatgatgttcagcgatggctgtgattacgtggcgccatccgcaggtgcgtgcaacttaggcgtattccaggcgtccaaggaagccggagccgacaagtggagcttcggagcagccaacggacagtttaaccagatgccggacaagatcgtggcttcccaggtaaaacgtgtggacaacgtcgcttactccatggtggaaaagatggtaaacggaacactgaagggcgaacagagcgaatacggcttaaaggatggcggcgtggatttaatgtactccacagaggatgccatgaaggacgcagtacctcaggatattaaggataagatagaggaaatcagaaaacagattgtagatggaacgattaaagttccggcttctcaggatgaatataacgcatatgtgaaatagaacccgtatcgagctgattgctcatagcgaggagaggggtaccgatatggaatatgcaattgaattaaaggaactgacgaaacggtttaatcagtttacggccaacgacaagatctcttttcaggtggaaaaaggggagatccacgcgctggcaggagaaaacggggcgggtaagacgactctgatgaatatgatctacggtctctatacaccgacttcgggagaattatggattaacggggagcaggttaaattcaccagctcccgcgattccatcgccaggggcattggcatggtgcatcagcatttcatgctggttccaaagcttacggtagcggaaaatatcatcgcgggtcaggagactggaacggcccttaagctggaccggaagacggcggaaaagcagattgccgagctgtccgatcaatatggattgaagatcgatccttcggtgaaggtcggagacctgtccgtgaccatgcagcagagagtggagatcttaaaggtgctgtaccgccgtgcggaaattctcatctttgacgagccgacggcggtgctgacaccgcaggagatcgacgagttctgcgatatcctgttaaagctcaaacagcagggaaagacgatactttttatcagccataagttaaacgaggtcatgaagatttccgatcacgtaacggtaatccgtctcggcaaggtgatcggaacggtgaagaccagcgagaccacgccggaggaattgacccggatgatggttgggcgcgatatctctctggggggaggcgcaagggaggagataaaatcgccgaaggagatcttaaagattgatcacgtgtcttataagaacaccaagaatattaagaaggtggatgacttaagtctttccgtgaaggccggagagatcctgggaattgccggagtcgacggcaacggacaggaggaactggtggagatgatctgcggtctgcggaccatggatgagggtgatattcttctcgacggagaatcgattaagcatcatcctacagggatggttcaggacatgggaatcggatacataccggaggaccgtcacaaagacggactggtactggatttctccattgcggaaaatgtgattctgggtcagcacaggaaaccgctgtttgcgaaacacgggctgatcatgaagaagaaagagatcggggagactgcggagcatttacgggaacagtacgatatccgttgctccggtatagactcggcagcttccacgctgtccggcggtaatcagcagaagatcgtaattgccagagccatcttccgggggccgaaggcgattctggcggttcaaccgaccagaggcctggatgtaggcgctatcgaatatatccataaggcgctggtggagcagagaaaccagggaaaggcggtgctgctgttatcgctggagctggatgagattctgtccttaagcgaccggattgcagttattcataaaggaaaaattgtggggatcgtagatgcccataagacgacgagagaagaactggggctcatgatgctggggcatgtgaccggaaaggaggaggaagcatgacgaaggagaagaagaacgaaaaaaagagggatggcttaaacggtgtgctgatgcaggtcgctatatccattatttcgatcgtatttgctttcctggtaggaggaattatcatagccgccatgggcgagaacccgtttaaagcgtattccgtgctgatcaagggcgctgtgggaacaccggtggcgctgactgtgtccttaaccaagactgtgccgttaatcctgaccggtctcgccgtggcggtggctcagaagagccgtgtgttcaatatcggagccgagggtcagcttctggtgggggcctttgccgccggttacgtcggcttcacctttcatctgccggcgcctcttcacattctgctctgtctggcggccgccgtgcttgcaggcatgttctgggcgtttattgcagcgtttttaaagtatacgagaaatgttcacgtagttatcgctacgattatgttaaactatattgccacttccctggtccagtatttcgtctgcggaccgtttaaggagccgggggctacctttaacgcgacgtcggcaattgccgggacggcaaagctgccgcagattctgccgcggccgctgtctttaaacctgggatttattattgcactggtgatgatcgccgcatgctggtttttgctgaataagactaccaccggatatgagatgagggcggtcggctctaatcctgacgccagccgcgtaggcgggatcaatattaagaagaacatgtttatggcgctggttataagcggcgcgttagccggactggccggcggaatcgaggtgtccggaagcttataccgtgtgatggagggcttctctccgggatacggcttcaacggaatccctgtcgccatgatggcaaacgggaatccgatcgcaattttcttctcagcttttcttctgggagccatgagaaacggtgcactggccatgcagattcagctggggatttctcaggatatcgtggatattattcagggcctggttatcattttcctgggttgtgattacatgatccgttactatatcaaccatgtacgtctcgaaaggaggaaactggcatgacaggaatgatctcgattttactgttgtcaacccttcggatggggactcctcttgcccttaccgctctcggcggtacgatgtcagagcgttccggtgttacgaatatcggtctggaaggcattctgaccgcgggggcctttgcagcggtggtgggcagctatttcaccggaaatccctggatcggtgttctctgtgcgatcgttatggggattgccatttcagccattcactcctttatcgcagtgacggcaggcggcgcacagaatatcagtgcaatggccctcgtgatgctggccaacggcttttccgcagtgggattaaacgccatcttcaagagtgcgggcaactcggctcaggtaaatgccctgccgactacaccgatcctggcgcacataccggttgtgggagagtttctggcaaagctttcaccgttcgtttatattgcatttatcatgctgttcgtggtctggtatctccttaagcatacgccgctgggactgcgcatcaccatggtcggggaacagccgaaggcggcggagacggcgggaatcagtgttgcgaagatccggtatttctccgtgctggcgtctggcttcttaggcggactgggcggcgcttacctgtctctcgggcaaatgaacctttatcaggacggaatggtttccggcagggggtatctggcgctgggggcagtcattatgggtaaatggaacccagtgggagcatttttctccgccatgttctttggtttgtttgaggcaatccagatctacgtgcagatgataccgaatttcccggtgcctcacgagtttatcgaaatgattccgtatgtggcgagcctgatcgttctggccggcttcatcggaaaggcggaaggaccggcagccaacggcaaaccgtattcccggttcgtgaatttgagataacgaatcagctgtgcaaactgacatagggcaaaacgcccgggcttcttgttttcgtgttgttcgaaaacaagaagatgcacggctgaacagatacgtaagcgggccggcagcgcccgcttatgtgcttatgagaaggaggtatacgtgatgagacaaagggatctgattgttaatcctacgctggcctgcgggaatcccttgaattttaaggaagatttagatatacttgagaaaacaggaattaagattctgcatatagacatcatggatggccattatgtgccgaatctctgcttcgataccgggatggtgggcctgatccggaaaaactattcgtttctcctggatgtccatttaatggtgacgaatcctgaggactatatccagccgctggcggcagccggggcggattatgtgagctttcatctggatgcgacccattttccgatccgtatgttaaaccagatcagggaaaacggcatgaagggcggcgtggtgctgaatccggcacagtctcccgatctgcttgcagagacgcttccttacctggattttatactggtgatgggggtggagcctggattttccggtcagaagttcctggaaggaaccgtggacaaggtgggaaaactggatagcatgcggaaggaactgggactctcttatttgatcgaagccgacggcggcgtagaccgggagaataccgttactctgctggagcacggagcggataccctggtatcgggagcattcggcgtgtttgaaggaagaaacggacttgagcaagactgcagggagtaccgggaactggcgcttaaggcagccggagagaggctggaagcatagaagcagattgacgaaggggggaaatggtgtggcgacaattaaagatattgcaagactggcgggcgtgtctacagcgaccgtgtccatggtcttaaatggaaaggactgtattaccaaaaagacaaaggaaaaggtgatggccgccgccagggaagtggattacatcccgagctttgcggccaagtcactgaagacgaagcgcagctataccatcgccctttttgtaggcgatattgcaaacccgtttttcccggaaattatcaaaggggtggaggctgccgccaaagaccggaattacagcgtcattatctatgacttatccggtcaggaccaggattttgtggagcagatcgataaggcggccagccagaaggtggacggcttttttatcaccggcagcacgcagatttcagaggaagcaaagaagaggcttttaatgatcgcggactcgggcatcaagatgatttcctgtaaccggtttatggaatggggagagttcccgctgatctatacctctgagggcgagcaggtggacggcctgctgagcaagctggcggcattgggacataagcatatcggctgcatctccggctatccggaatactgggtagcggagcgcagggaaggcttttaccggaagacgcttaagcagtacggtttgtaccatccggaatatattgtgaatggcggattcttcatagaagatggtatccgcagcaccaggatgctgttaaaggaacagccgcagattaccgcggtgatgtgcgtgaatgatacactggccattggctgcaatgcggcggccagggagctggggcttaaggtaccggaggatttgtccatattcggcgtggatggcgtggaatgcctgaaatattttgcgccgcagattacgaccgtggatacccaccggtatgagtatggctacaaggggactgtccggctgattgaactgatcgaggatgacggaagccggaggcaggagcttctggagactatggtttgcccatgctccatacggcagggagatacgattgccccgccgagaaaagaatgatatgagaaagaaaggctggataaaggaatgagaataggaatcggatgcgaccacggcggttatgagatgaaggaagaactgaaaaaaagactgaccggcggcggacatgcagttacagataaaggaatttacagtgtcagcgaggtggactatcctgacgtggccgcagaagtggcagagggagttgtcgccggagagtacgactgcgcgattctggtatgcggaacggggatcggtatgagcattgcggccaacaaggtggatggaatccgtgctgcgctggtgacggacacgttttcagccagaatggcaaaggagcataacaatgccaacatcatcacgctgggagccagaacggtgggaatcgaactggcgtgggaactggtgaacgcgtatctgggagcggaattcctgggagggaagcatctggtacgggttgagaagattatggggatggaaaagtaagacgaaataataatgcggatatccacagaaatatttcgagggtatcttgaaccttagtattgtgtatgctgctcagaatccagtatgaaattgatatcgttacctgtgagggcagtaacatagaacaggttctgctgaaggaacaagcagttgataattaaaaataagacataagatggtttaagcaggcggaagtgattcacttccgcctgtttaattggatagaaaggcaatttcctggatgtgcctacggactgtctccagagggatgagcgcatgtgctgaagaagtatgactacatgctactctttcacgacgatttcccaggctggctctatgaggtccacatgggggtgacgacgatctgggaacggtggaattaaattctgtccgacgaaggatcagcggcaccgggatgaacagcttaaaccgctgcgcctacggttcgattactgaacggcttatgaaagcgcgggctgtgtatccgtctccgtatggggaatacgtatcctgttgtcaccgtccttatgccgctccaggataatttcattatcctgtaagaataaatataaaagaaaagattgagtaaatagacaaaacatattagaatataaagataaattcaatttctggattgatataaatggcagtgggaggtacgaagatgaagcggatcacgctggataagctgactggaaaactggaaaaagcatcctaccaaacccagtacgaccatatcatgtcgctgatccgggaaggacgcataaagcctgtggctgcttccggaaagaacgggaagaagccggcgctttatctggaatactggattacagagccggaagaggagcaaaaggaacggctggagcggcttcggcttcttaaggaagaactggaatacggcttatcgcctgcgattggaatcgattattacgtttctcatccggaggtctatgaggcagagcgttcctgggtgcttatgatggaccggtatttgaagaactgccgggaaaagcttcggacggaagagtccatgaacgagcggagctttgagatctggggcagggaaaaatttcttaaggaagagcagggaaagacggtgtgcaggcacatgggaatatccatggaaatgctgaatatctatgatacgtcggaaccgttggcttactattcccacacgaaaaaggtaccgcagaatctgctgattatagagaataaggatactttttataccatgaggcgccatttgatcagcggcggcggtccgatttttgggctggagacgggaactcttatctatggcgccgggaaacagattctccgctcattccgggatttttctctgtgtatggagccatatattaccaattctgggaataaaatctactatttcggtgatcttgattatgaggggatttccatttatgaagatttatgcggccggtttggcagggaatgggtgatagagccttttaaagccgcttatatagccatgactgaaaaggtgctgaacactctgaccgttcaggacagccttgattccggcctctgttcgctgcctgggatgaaggagaagcagagccgacggggcggagatctgttttttggatattttgaagcagcggagcaggaaaaaatgaaggcggttcttctggcgggcaagtatatcccacaggaatgcttaacgatcagcgatctgccaatgaggcctggtgattatgatggaacatgatttcttaaaacagttctggaagcgtatgaaaagcgttggtatgtacgcccttctttttcaaaacagctttcagaagaccacctggaaacagtatggattcttaaaaatggatgagcagattaatatgatctttgcagttctgctctatattatggaacagtctctaaaggacgagccatgcaccatggatgatatcggcgcttatcttgattccgtcaatcagaaatacctccagaaaccgctgtcctatgaggagtgcaaggagctgggagaatttctgattaacgtcgtgctttgcaatgagggccgcgccatgtattttgacgggtatgattttgagatgaacgcttataaaatcatgcatatcagctttgtggccaaccggattgtctacgtggactcggatgtgaagaggacctcctactatttgacggacgacggatacaatctgattctttccaccttagaggtggagaataatatgaagctgacgatccacgagatcattttccagatgcatttggagaaagccagctatgacaaagcggtggatgagattaagaatatctttaacctgctgcgaatccagctccagaagatcgaggagaccatgaaccgcatccggaggaacgccttagagtacacggtggcggattaccgtgaaattctggaaggaaacttggagacgatcgccgacacgaaacagaagttccagaactaccgggaggttgtgagaaagcgggagagagagctggaggaagaacatattaacgtaaagcgtctgggaaaacaggatgaacagtcgctggaaaatctcaggattatagagggctatttagaccggtcgattgacgagtatcagaagattttgagcagccattttgatttaaaggcgctctacaccagggaactggagcagatttcccagatggcgctgattcggcgttttcatttaagaaatgacctttacgataagatactggatgatgtgactgccttagaccggctggaatatttcctgaggccgctgtttaaccgggaacaggataagatctacaatatcaacaaggccctggaattccagaagccggtcagggagaagaaggaagaggcggaaagtatctattcctttgaagaggaagtacttgacagcgaggaagagtacaggcgcgaacggctgaaaatgtatgaggccagtctaaaggtactcctcggctttttaaagagggagggagaaatctctctaaaagcaatcagagagacgctgggagatcagttaaaagaactggttccggatacggatatttttaaggaaattatggtggaactgcttaagagcggcagactcgacgtgcagatgcttaaaaaggagcgaagcgagagcctgggcgataaaagtgcggaattccggctgagcgagatgtttctcgatcttttggagcaggacgacagcctggcggacgtgacggcgctagaggcgtaccggatcgaggatggagagacaatcgtatttgaaggtgtgaaaaatgctgagggaagactctgtaatatccgatgctccaatgtccttctgcgtcttttaggacatcgcgtgtgacaggagggagaacagttgtgacaggagggagaacagtgaaatggcatatgaattttccgatatcagaacgagccaggagatcttttaccatcttttgatgaagcgggagctgagggaagaggatgaaccgtatctctatcaggcgtatacggagcaggagcagatccagaacctggtaaagagccagggggatgcggcggagagcttcgtagagcggtacggcggggtgatctatctaattcccaaagaggataataattttctgggattttcgaaaaatcagttaaagcaggcgctctgcaaatccacagcgacagataaggattactacctgtcgcagtttgtcattctcacccttttggtggaattctacgatggacagggaagcagcagcaaggcgagggagtatatgaaggtgggagaacttcaaaactgtatttccgaaaggctgaaagagggatgcgaacgggcaaaagatgaggaagagcgggaggggctggctttttccaacatgctggaggcgtatgaggcgctccgttccgatgacaggggctcaaaggcaaagacgacgaaagagggattcctctatcatatcctgaattttctggagaaacaggggctgattgattttgtggaggaagacgagatgattaagaccacgaaaaagctggacagttttatggactggaatctgctgaaccagaatcagtttcagagagttttaaaggtgctgggggtggaacatgagtaagatcaatgcggtcaggattattaatttaaattataataacaacgccatacggatcaatgacgagacgttccgcctgggaggaaaaagcacccttttgtccctccgcaacggaggcggcaagtcggttctggttcagatgatgacggcgccctttgtccacaagcggtaccgggattccagggaccggccgtttgccagctattttacgacgaataaacccacatttattctggtggaatgggtgttggacggcggagcgggatatgtgatgatcggaatgatggtgaggaaaaaccaggatttgtcggagggaaacggcgaagagctggagatggttaatttcatcagtgagtataaaacgcggtgcgagctggatatcgaccatttaccggtgatcgaaaagacgaaaaaagagatggcgttaaagggctttggcgtgtgccgccagatgtttgaacagtggaggcgggaccggtctgtcaaattttcttcctatgatatgaaccaggcgcctcagtcgaggcagtattttgaccgtctcatggaatttcggatctactataaggaatgggagacgattattaaaaaggtgaacttaaaggaatcgggcctctcagagctgttttccgactgccgcgatgagaagggtctggtggaaaaatggtttctcgatgcggtggaaaacaagctgaataaagacaaaaaccgcatgaaggaatttgagaatatagtcaccaaatacgtgagccaatataaggaaaaccgctctaagattgagcgcagggataccatccgcttattccgggaggaggccggtgagatcttaaaggatgcggaatgctacagggaagaggctgccgccgctgtcgctcacgaggggaagattgctgcatttatcggtgaactggaccgtctggaggcggaagcggagaacgaaaaggccgccgtacaggacgagacggaggcgctggaagctgagattaagagaatcggatatgaagagatttcctgcgagatccacggatatgaggaggagcagacgcttcacgcccgccgccgcgatatggcgggctttgaactggacagcctggagcacgagtgcgagggcctgacacaaaagctgcggcttctggaatgcgccagatggcgggagattacccgggaaagcttcagagattatcgatttgcggatgagcgtctggctgcgcttcggcagaagaaagaggatttagagccggagcgcgtaatgctggggacgagacttaaggcttattatggggaggtctgccgaaaggagtctgaggaagcggaaatacttacggagtctctgtgcgttacaagagagcggattgcagcgcttaaggggcgcgaggccggatatcagaaagcgctgcaggaggcggagcgtctggcaggcggccttcagaccaggatatccggttacgacggcgaggaggaacggtataatcggagacaccgccagtcgttgagacggaatatactgggcgagtatgaaccggccgcgctggaaatggcggcggacgggcttatcagagagcgggagcaagtcagccgccttatgacggagggaaagcgtgaggccggccgtctggaggaagagctgcggattgtggatcggaatttagaggatgcgaagaaggatttaatcctcacggaaacggcgaaaaaggaacagacgaaggaactgggccgtctggaggaagaacggaaggacctgcgggtgattctccgctatctggagcttccggaggaatatctgtatgaacgggacaggatcctgactgccatccagcggaagctgagcgacatcgccatggcgcggcgcgggtttgagaaagagctggacgagctggaaaaggaataccggaagctggcggagggaagcgtgctggagctgcccgctgaattcgaggaaatgctggaacagaccggactgcgccgggtctatggaatggagtggctgaagaaaaatggcaattccgtggagaaaaatcaggaactgatcagaaggcagccgtttcttccatattctctgatcttaagccgcggagagctggagaagctgattaagagtggaaatgaattgtttacgtcatttccaattccgattattaagcgggaggatttggaagacggagcggtggagtgcgacggcggaatcgtttcgctgggtaaaatcagtttttacgtgttgtttaatgataatcttctggacgaggaaaagctggctttgatgatgcgggaaaaagaagcgcagattggaagaaagaggcaggcggcggaccagaaggacaaggaataccgggagtattttgaaaaacaggagaagatccggagtcagacaattacgaaggagcggtacgatgcggtagagcaggagatcggacggctggaagagaagatttcggagctgaacgccgggatattggagctgtcagcaaagcagtcgtctaagaaagaacgaaaacgtgttctggagcgggagagcgcggaggcggagcggaaaatagaggatcttaagcgccaggaggaagacttggcagcgcttaccggtttttacaaagtgtacttagagagccgggcggagttgttaaagtgccgggataagatggaggcgacaaggcaggaccaggagagaagcaggcagctctgtgataaactggaggcgaaggaaaaatcactggaaggtgaaaatgggcttttaagagagcggatgaaggagacggaggggaaacggcagatttacgttgggttcggaggagagtctgcgggagaagctgcgatagaaactgtggaagaagctgcggtttcgggcacaggtgtaagtgcagcagatgctggtgaatggcatccggtcattccgtctctggaagaggcggtgggcctggaagccaggtatgcggccataactggaaatctttccggtgaagaaagggagctggaggaaaactgccgaaagactttatccgtctatgagaagaatgaaaaagaattaaaacggctggcagagaagtaccggttaagcgctgcagagtatcaggatatctggtacagtgctgaggaaaaagaccgtgtggatgatatgctggagacgaagcagacggaaaaaaagatcagcgagaggaaatggaacgaggaagacaagcttgtggcactggcggtacagaacaaagaacgctgtcaaaaagatatggttaaaaagtttggcgaggatgagccgctgccgaaagatgcgattacgcaggtggattttgacgtccgcaggagccgggctacggacagggtaaaggatgcgagagaccggctccgtgcagtggaagaaaagctgcggtcctatgaggaaaatctgacggctctctcggaataccgggaatttgcaccggcagaggggctgacctgggattcgcagattccgttggagaatatgacgccgaagcagttaggagactttaaaggaagcatgatccgcgattaccggcaggccctcgagaagaggagcgggaaaaaggcagacctggaacggacgttaaaccgtgtagtgcggcgggaggaatttgcagaagaattcttcaaaaagccgttggagacgcttctccttcttaccagcagcgcagagcaggtgattatgcagcttaccacagtactttcttcctatgaaagcctgatggaaaagcttgaggtggacatctccatgattgaaaaggagaaagacaagatcgtggagatcctggaggattacgtccgtgaggttcacgcaaatcttggaaaaatagaccggaattccacgatcaccgtccgtgatcgccagattaaaatgctgaagatccagatccctggctgggaggagaatgagaatctctatcacgtccgcctgatggattttatggatgagatcacggcaagggggatcgagcttcttcaggagaaccagaacgcctctgagtatctgggaacgagagtgacgacgaagacgctgtacgatactgtggttggaatcggcaatgtggaaattcgtctgtataagatcgaagagaagagggagtatccgattacctggtccgaggtggcgaaaaactccggcggcgagggatttttatcggcgtttattattctcaacagcctgctttactatatgagaaaagatgagacggatattttcgcagaccgggcggagggcaaggttctgcttatggacaatccatttgcgcagacgaacgcctcccatttattaaaaccattgatggatatggccgaaaagaccgatactcagttgatctgcctgtccggcctgggcggagagtcgatttacagccgttttaacaacatttatgtgctgaatttgattgcggccaatttgaggaacgggatgcagtatctgaagtccgatcatatacggggatcggaggaggagacgatagtgctgtcgcaggttgaggtgaatgagcagttggagcttaatttgttttgaggcagatatggatgctgagagaaacctgtggcagatagctggatgaaagaataaagactatagattgaaaaaacatgattgacagaagtactggaattgatttataataaaggtacaaaaaggcagtacactccagtgagtggcttccaagttaataacttaatgaaaaatagtcactatgcttggtgggcggggtgactatttttttgtacctgtaatcataacgataagtactccaaacgcaatcatcaaagaaagtgtctcatatgtactcatgttataccaccccctttcggagatggaagtcacccagcagtagtactgcctgcttccattatacaaggcagtgaacaggctgtaaatagaaaagaaatacttgtttacagcgtaaacttatagttggctttagctattaaaacttataccacggaaatatacttactcagtataaaaatgctgatgattgaaaaaatcatgattgacagaagaactggaattgatttataataaaggtacaaaaagggcagtacactccagtgagtggcttccaaagaataactgttataaaaagtagtcgttaaacttggtaggttgggcgactatttttttgtacctgtaatcataacgataagtactccaaacgcaatcatcaaagaaagtgtctcatatgtactcatgttataccaccccctttcggagatggaagtcacccagcagtagtactgcctgcttccattatacaaggcagtgaacaggctgtaaatagaaaagaaatacttgtttacagcgtaaacttatagttggctttagctattaaaacttataccacggaaatatacttactcagtataaaaatgctgatgattgaaaaaatcatgattgacagaagaactggaattgatttataataaaggtacaaaaagggcagtacactccagtgagtggcttccaaagaataactgttataaaaagtagtcgttaaacttggtaggttgggcgactatttttttgtacctgtaatcataacgataagtactccaaacgcaatcatcaaagaaagtgtctcatatgtactcatgttataccaccccctttcggagatggaagtcacccagcagtaggtactgcctgcttccattatattaggcagtgagcaggctgtaaatagaagaatataaagattttgcggtgaaggcgtacagatttcagcaatggctggaaacgaaatctgtgcgtttttctaattgcctcagcggctcgtgcacagaatgtgcgggagagcgttaaaactgtatgacacttttgatggaggggaaagacgggaattcacggtgatcctaatgtgtcaacacctaacatggactggctggcccgtaccgactgtgattttgaaatggcgtactctggcatgccgtgttgcagcccgtttcgagggtcgttgctggcaaggtgcaatccgcaccactgtgtactgggccatgaagaagatccgctggaagaggtgaatctggcacacaacggagaattccgggaaaaacgtctggagctggaggcgtgtctccgggagtgggaggaaaagaccgaggatttcgagaactcccgcattgtaagagaggaaaaagtatgatatactttggagacaattaagagactgtcataaggggggactgcggacgtggattccgcagcatatacgaatgaaaaaatatattggaaacagagctttttatcggatgatactcgcgatcgcagtgccgatcatgattcagaacggcatcacgaactttgtggggcttttggataatattatggtcggaatggtgggaacggagcagatgtccggcgtggccattgtgaatcagctgatgtttgtgtttaatatcagcattttcggggcgatttccggcgcgggtattttcagcgcgcagttttatggcagtggaaatcatgagggcgtgcgccatacgttccgttttaagcttatcttcagcgtcctgattattgtcgtggcgggctttctgtttctggtatggggagaagattttatatccatgtatcttcacggtgaagagaatgcggcggggctggctctggcgctggatcagggccataagtacatgctggttatgattctggggatgattccgtttggcgtcgagcaggtttacaccagcaccttaagggagtgcggagagacggttattcccatgaaagcgggaatcgtggccgttcttgtgaatctcgtattaaactacatccttatttttggaaagttcggcgcgccggtgctgggcgtagtaggcgcggccgtagctaccgtgatatccagatttatcgaggcagggattgtcattcggtggacacactgccataaaaagaaaaatccatttatcataggggcgtaccgcagcctgtacattccaggaagtctggtgaggcggatcattattaaagggatgcctctgatggtcaacgaagttctgtgggccggcggcatggcgacgttaatgcagtgctattccgtgcgcggtctggcggcagtggcgggaatcaatatttcctccaccatcggaaatgtattcaatgtggtgtatcttgctttgggcaactcggtggccatcatcatcggccagctgctgggggcaggaaagatggaggaagcgcgggatacggatacgaagctgattgcattttccgtttgcctctgccttggaattggcgctgtgctggcgcttctggcgccgttgttccctatgatttacaatacgacggatgaagtgaaagcgctggcgactgcatttatccgggtgattgcgctgtatatgccaatgggggcatttctgcacgcgtcgtattttaccctgcgttccggcgggaagacgattgtgacctttatctttgacagcgtgttcatgtgggtggtcagcattccgtgcgcctatgtgctgagccgctatacggcggtaccgatcgttccgctttatttcacatgccagatgatcgaaattattaaatgcgtgatcgggtatgtgctggtgaaaaaggggatatggctgcagaatattgtggaggcgtagagcgtgcctgtaaattgctttttgttagctgcgctccaggcttacgagtcaggaacggcgtgccggacgcggtgaccgggggcaggaggtcaggatggccaggatgaaaaagaggagaggtgcggtaactttaatcggaagcggcaggcaggaagtgaaggtgtgcgacatcgtaaatggaatacccaaggtgaagcgggtggaaaagggagagtatcttgaggtacgtctgacgtactccctgtttcacagagagataaagcggtatgataaggagacttttgaggaaataaagaggcggtagggttagagactattgcagagaaagtaaagcagctggatggttttctgttgttggaacggagggcgtttggctgttttttttgacgtgtgtggatgaggggagataaaaataaaaggattgacatagtaaataatgatatgttataaataacataggttaaacataacttataaaatataaaaaggataacagatgggagcattgatgtgtgaacttaatcaagcatacctaaaagcgataaacctaaaggcgaaaaaacctaaaggcaataatacctggacccaattaaaacctgaaaccaacatacccatccctgccccaactataagcagttaaaacaccgaaaaaccgtttcaccatcaaaaaggaggattattatcatggtaacaattgattacacaattttaggaatgctgagctggaagccaatgactggctacgacatgaagcgcatgatgcaggattcgccggtcatgtactggtcggggaataacaatcagatctacaaagctttggtacagctccttgatatgggattagttacaaacgaggtgcagtaccaggaaagcgcgcccaacaagaaggtttattcaatcacggatcgtgggaaggcggccctggaagcgtggattctggagacagaaccggaaattccggagtttaagaaagcgtttctgattcagatttcctgggccggactgatggaaaaagaaaagattgaccagctccttgcccggtatgaggaacaggtcagagaacagatttcaatgcggcaggaggaaaaacggcgtcagaaatattttccaaaccggtctgagcaggagcactatgtatgggaccagatctatgataatctctgccagtcctatgaggccgaacttcaatggactctccggttccgcgaaggactgaaggcattgaaatgacgactgaacaaatgcgtgaaaatgcggtaaaatacggtaatgaggaaaataccagatcccatcagtagtttgccagggagtcagtcgttatttatcaagtagttatcaggcagtcgctgccagaataattaattacctggtaatagatctctgagtttaatgaacaaataagtaatgaatcaccacaaaaaatcaaaagaaagggagaaatatggtatgcagacagaaattataatcatgaatcaggcaaaagccgcggttatttacagcgaggaatgcattctcaaggacgtacagtcggcgctggacttcatgatgagtatgaaatatgagactgattgtgataggattgcgctgaataagaaggcggtcgcagaagaatttttcattctcagcacaggtctggcaggcgaaatcctgcagaagtttataaattatgggataaagttcgcggtctacggtgatttttccagatatacaagcaagcccctgaaggatttcatctacgagagtaatcatggaacggatgtgttctttaccagtgaccgggaagaggcagtcaaaaggcttacgggatacggtaagcccagagaagccaggtctatctgattgcctttgccggaacgcctgcgacaaccgcatgatccggaatattccggatgataacggccctggccctgctatggtttcagcctctgccagacagcagggatacagttcttaagcgtctgggcaattctggattcactctctttgcacccggtatccacccagcgtttcagcaccatggtgaagcctgcctgaaaatagacgaagtaatacatcatttcgtcttccgatgtaatcccggctgcctggcagcgcggttttataatcagattccacaagggttcaaatccctgcttgagcggaaatgcccgcctggtctgcaaagcaatccggtagaaatactgatgctttcggatatgctgcaggaaaaggagaatcagcgggtccgagaacggcaaatcttccggattgctgtggaacggatagctttccagaagctcctgatgcaaaaaatcttccattcgatccagcatgtcgtaaatatccgtaaaatgcgcataaaacgtggaccggttgactccggcagtttcacatatctttttgactgttattttctcaaattctgtgtgcttcatcaactccagcatggcggcatccatgcgaatctccgtttcccggtagcgttgattatttttcgtattcatggcgtcagctcttttctattattccaacacaaatcggtatattgatgattgtacagaaaactgtaacacagtatgataaagaaagcaagaaaatgaatgaaataacaggaataaatcactggaaaggaacgaagcaatgaaagcagcaatttatatgggaaaagaggatatcgaaatcagagagattcccacaccggagtgcggggatgacgatgtgctgattaaaaatatatactccagcatttgtgggacggatgtggctgtgtatctgcatggaccgaataccggacaccgcataacgaccggcggagagttcggtcatgagaccgtgtcgcgggtggcggcaattggtaaaaatgtgacggatttcaccgttggggagcgggtctatccgtatccgcgctgcgctaaaaatgatacgaaacgggccgggacaattggaggattctctgaatacattcttgtgccccaggcgaaacggaatcattcgctctatccggttccccaggagataccggaccggatggcctgcctgattgaaccattcaccgtggggtgccgcgcggcgagaaggggacagccgcaggctggagagagcgcggtggtatttggggccggtacgattgggctggcggccgctgtctccttaaaatattttggaatggaccgggtcatggtctgtgatcgatcggatttcaggctcgcggcagccaaaagactgggatttgcagtctgcaacaacgaccgggatgatttcgccgctgcggcggtggaatactttggcacagcgctgtccctgaccggcaatacgaccgatattgactgttttcttgacgcagcgggagccgggagtattctggaattgttcatgtccctgggaaaaatcggtagccgcttcgtttccgtcgctgtgaataatgcgctgcgaagcctcgatctgctgcatttgacctttgcgcagaaatcgatcatcggttccgggggatatatgccggaggatgtgcgggacgtgatgaacatcatggagagcggaagatgggatctggaatcgatgatcacccatgaatttcctctggatcagatcgagacagcgataaaaacagcggcggatacagaacatgcgctgaatgtgacaataaaactttaaggataatcgcagcaataccttaaactcaaacaattctgaaacaaaactatgatacagtaagaaaaaaggcggaaaaaggaggaagaagatgcacattctgtaccagtggatcggggacggaagccagagaatcagggaaaattacagcgcgtcagaaagcagatccctgcacatgacgggggcagcgggcgctctttgtatgcttctggggctggggaaaatcatcttcggcgcgctgtcgctttcggtgtttacctgcataaacggctgttataccctggggatgacggcggcaagatactgtgccctggcgggaaccgtgcattctaaggaacggaagaagcagtattgctattaccgtcttgccggagccgttatggttgctgccagcctgttgtatgttgtatattccttgtggacaatccgccatccgaaaactgtcaattatggtaaaatcacggcaatcaccattgcagcgatcacatttacggaaatcggcgtcaatgtatggggcgtaataaagtaccggaagtaccattctcccctgctccacgcgctgaagatgatcagtctggggacttcgctgatctcactggtgctgacccagtcggccattcttgcatttgcagacgaagcgcaggatccgtcggtcaatggttttctgggaacggtaaccggaatctgtgcggccctgcttggtgtttatatgatccggcgtattaaccggattgaggctgaggacttacatagagaggactcttattaaggaaaagattcatcatgagaagggagacgatctttatgattcacatactggtggcagatgatgatgagaaactgacacagagtatctgcagttacctgaataactgcggttatgaggcgaaaggagtgctttctgcagaatacgcctatgacgagatgtacagccgcttatacgatctgattatttctgatatcatgatgcctggaacggacggctttgcatttgccgaaacgatacgcggtctgaataagagaatcccgatcctgtttgtcagcgccagagatgatttatcctttaaacagagggggttcgatctggggatcgacgattatatggttaaacctctggacttaagcgaactgctgatgcgggtgcgggcgctgctgcgcagggcaaatattgaggccagccgcagactggtggtgggaagtatggttctggatgccgatgccatggagattacgcagggagaacaggagattccggtgaccacgcgggagtttaacatcatgtttaaactgctgtcgtaccccaatcatacattttcccgttcccagctgatggacgaattctggggcgtggacagcgataccagtctgcgggccgtggatgtctatatcacgaagctgcgggataaattttccgcctgcagtgagtttgagatcaggacgatccgggggctgggatataaggcggtgctgttatgacgggaaaccatagtacggaggatggacgggtcacccgccgttatttcttttttccagcctatgttgcgctggtgtttcttctggcggttctgatgatgctgccgacgatcttctacggcggcgcccatctcatactggaagaatctggtccctatataaaatggtattttctgtattgtattgttcttgcggctctcgtatccggtgggctggccctgcggaagtatctgaattttgaccgcccgataaagaagctgagcgccgcggccagacaggtggcggagggggatttttccgtctacattcccaaacgccatacatccaatgatatggattatattgacgcgctgtttgtggattttaataagatggtggaggaactgggttccatcgagacactgaaaaatgattttgcggccaacgtttctcatgaattgaagacgcctctggcagccatccagaactatgcgcagctgcttggcaccacggagctgactccgaaacagcaggaatatacagaacggattctgtcgagcacacagcgcctcacatcgctgatctacaacattctgaagctgaacaaactggaaagccagaaaatacatccaaaaccggagccatacgatctctgccgccagctcagcgactgcgccatcggcttcgaggccatctgggagcagaaaaagattaattttgaagctgacatggaagaccgtgccgtgattgaggcagatgaagaactcatggagctggtatggaacaacctgctgtccaacgcctttaagtttacaaaatcggggggaacggtgagcctgcgccagttttctgacgaagagcgcatcgtcaccgaggtgggggataccggttgcggtatgacgccggagatgatgaagcatatgtttgataaattttatcagggggatacatcccattccacagagggaaacggccttggccttgccctggtgctgcgcgtcctggagatgagcggcgggacgataaccgtgaacagcacagaggggaagggcaccgtctttacggtctcactgccccgagcggcactggcacagaagggggaatcacagacatcatgacaagaatcaggaaagacggcgcggaatatgtgggatatgaatataaggagaagtctgttccggccttatatgcatcgctgtatctggacagttatccctgtttcggatgggaggaggatccaaacggtatgagccgtaaagcgaatacggagaccgccagccgtgcagttttgcgcttccggagagacagaaaactctgcaacagggcggaactgacccgtctgcagaggaactttgacagctgtgttgctgagattgatgcactggagcagtccaaacgctcgagcgctgtcataggagcccttgttaccggaatcatgggaaccgcgtttatggccggctcggtgttcgctgttacggcagaaccgccgatggtggttctctgtattttgctggcagtccccggttttacaggatggattgttccatattttttatatcgggcgctgctgaggaaaaagtcggcaaaggtatcgccattgatagaagacaagtatgaagagatttacgaaatttgtgaaaagggcagtgaccttttgatttgaaacagtatgagcggcagcttctcgcgtaaaaggaaatgattacgtgagaagctgccgctttttaatattacagaagcaaatatcaaacaagaaagaaatacagaggggctatactctctatatcccattgagaaaggcggtgaatgataatacacggacgaaagacagggcctgtgagtaagagcggtgacaggctgactctcatgctgctgttttatattgcggctgtctgcggttggctgtgggaagtactggtatactggggcacaagtggatttggtggttcgctgacggagcttttagttttttaccggggtgttctgcatgggccatgggcgccgatctatggcacaggcggtatcctgctggttttgctttaccgggcagtacaggagagaaagggatattttttaattgccgccatggcggtttgtacggtggtggaatatggaacctcatggattctggaagtattctttcacgctaggtggtgggattataccgggcagtttttaaatctgcacggaaggatctgtttcgtcagcatagtgggcttttccctgattggactgtgggcggtacaggccgtcgtgcctgtctgcaccggatggattcaaaagctgacgtatgagaccagaaaatggctctgtctgttggtatcattgctgttctttctggatgtaattgtttctgtttataaactcagcatctcataatgtaaatgaactgctcacagcgggtgtcatggaagatgcagttacattaaagagatactgtatttcggaatcggcgtattgccggtcggatcgtgagaggagattaagatggctgaatatcgtttaaaacctggtagagccgggggaaaagtaatcggtgcttatgagaaggtggagaagaaatttacggatgcatttctggaggaggatgcggtttccgattcaggataccgcctgaagacaagaaaaacgggagagtcggtcaaaggagcgtataagaaaattgaggattgcgtggtgggtgcgtataaaaaagtggaagatgcctttgtcgatgcgtttttggtacgatgtgatgaggaaaagcgaggggaggtggacaaatgaataaactaggggttggtatggtgataacagccggcgccgtggttatggcggttgtggctgcggcagcggttgttcgcaggaaaggcagtactacactgcataaatttttgtgatgaagcagatatgcatattacttacaaaatattccgactggatttccagtctggtttactacatcggaggacaggggtatacccacagttcgattgcgctgggagaccagccgacacagttttacagctttaattaccggggatttgccgtggaaacaacagaaaaacacaggcggcggggagtccggtacagccgcctctaccgcctgaatgtttcggataccgtctatgaacgtattgaggagagaatccggcattttctcgaaaacagggagaagtaccgctatacccgtctgggggtattatgttgtgttctccggattccattgtattggaagaatcattatttctgttctcagtttgtggcagaactcttatcagagtcgaacgcgctgccgctgtcccgcaagccgtgcttttacctgcccaaccattttatacgcctgttggaaacacagccctgccttgccggaatggaacaggatttcatttaaaataacaggaaaaaccattcaataaaaatgttaactatggaggttcatcatgaaaaaaagtaattttacagcattgattcttggtaccgtcggtatcgtgttttttgcactgggaatgtgtatggcactggttgaagagtgggggctgttccggaaaggcatcatagccggtgtggccggccttatcattcttctgattactgtgattgtatggcgcagaatggaaggaaagagccctgtcaggctgaatgcaaagaccgtcggatcggtactggctggtgtgctgggagcgctgctgctgggcgttggcatgtgcctgtgcatggtatttgacaaaatgattccgggtgtcatcattggtctggtgggaatacttgcacttctgatgctgattccgatgacaaagggaattcacggttaaacggactgctacagcagttttgtgttccggtacttgccctggggctttgccgaaacacgaaactgctgtatatttttatggaagcattgtgtaaaacgccggggcagccatctgaagtttacagtaaactgcatggatgattttgaggaggcgaaaggctggcttttatgataaccagatggcctgctccggcggctgaagtgcaaaatagaaagagccggtaatccgaagttttataaacttctgaattatcggctctgcgtctttgcgtctggctcttttatgattgttatttgaagctgttttagatcaatcagactttcctgtctgcatttggggcagtacagggggaaattctttagttctgtgtcgtctcttactttcattcgcgtcttgttcccgcaaatcggacacagtaaccacatggcgttcatcatttactatcacactcctaaccggcaattccatgtccggattatgcaaacatgggctccacacattcttttatgaaatccattctgtccccggtattttctttgaaaagagaagcgatggcgatgacaagctttttcttccggttgacataaattgtattaccactgtctcccatggctgcaaaggcattttcatctgcgatccaccacagatatccgtagggcagatttaactcctcccaccggctgtgctcccttgtgctttcggcaatccactgggcagagacgatctgcttcccgtcccatttgccgccgtctaagtaaagctggccgatcttcgccatgtccctggccgtgagcgtcagcccccaacccgccgcatgaattcccttcgagtccatcacccatccgcttacgtctctggcattcataaaggcgtagtgggcttcttcattttccagggttatactgccttttaccgtaataccgagcggggtgaaaaggtgttccgccgcaaattcgagcacggattgtccggttgcctttaccagaatgcctgacaggatgtccggaccaataaagggcgtatagcggaatgttcccgctttttccgttcctcccagtaattccagcgcggtgcttacccagtcatcccttgtaaaatattccagatacggctcttcctgatgcttgaacggggcagtcattgtcatcagatcccgaagtgttatatcccgtaccgttgtttccccttcgttgtaattttcaaccgggaaatccgggaaaaagtccagcaccttctggttgacgctctggatctctcctctgtcgacggcaatgccgatcaggatagaaataatactttttgttaccgaaaaaatgttgatgcagctgtcagccgtgcatccgttaaaatagctttcgtactgtgtttctccattctttaaaacaatcatgccggcagtattactgtaacgactatgaatgatctcttccaatgcagcgatcgttttctgattcatattgttattctcctttgtcattaggcgccgttgtcgggcagccatgatcgggtacctgttattagatacccattagctggtgtcgtttcagcctggttctgcctcctcagatgatgggagtacctccttctgtctatagggtaaatgcattaaaaatgtttttcaacaacttttttaaaaattttatgtattagtaccgtggataaagcggaaaagggcatacttagctttttaacagcgggcataaagcctgctgttaaagaggggacgttttcccaaccgtctgatactatttggcatgtattccttcaaaagttcaggatgaaacacggaagaaatgaagcatagatcatagtggtgggctggaaagttaaatcccggatgactgaggctcccccagctggtcggagtgcagtataagaccaggcatcaggattacaaacgtttactgaaaacgaatggggggtatcatcagcacaaaacgagttgtagatgaggatttagcccagatgcggttgttgtgaaaaacgtcttcactcctaagtatagacgaaaaatgatatacaacagttacacggaatgcaggtaatgtggcggtgggtgaagctacaggaaatcacgattgataggagagtgtgtatacggattattttcccactgaatcaggaatttcacctcataaagcagagtgctattctttgttctcatcaaagttaaaaactgctgcgagaactctgcagcaaacatctggatgagggaaaatttgaattttgtggcggactcagacaagaaaatgttgaatttcaaggttaatgcaactttattaaagtaaatgcaactcatgcagctctattttgcccaaaaagtaaaatagggctgttttttgtgccggtttcgtgtaaaataagagtaatccaccacgaaaagccttaaaaatgggcgtacgataccggaggtgagatttgcctgcttttttatcagagtaaatgccacccctgtttcggcgttggatttgatagggctgggtctgggttgattgttaagggggcttggggaagcgtggcccttaacattgggtttgtcggaagaaagggaatggcgatgccagtccccggctttccggcttttttgtttctatctgtttaaaagtgcaggggttaaatccacttcgtttggcgggatcctatggcatcccaatgcatgaagcagatccgcaccgtagaggaattcaaacaattcatatggacatttatttccgagactttctctgctgtaagagttgatgtggtccataagcagagaaatgtctccttgagtcagttggtcaaaagaagtccctttgggaaggacataccgtatgaattcatggtttttctccgcagagcctttctgcccaggggaagaagcgtcgcagtagaacaggcgtgtgcgcagatttccctgacggtcatactcgatggctctggggttagagaattcacttccattatccgtgaggatcagaggcatgagggacgagaaccggtccggcccgagttccagatacaggcggtcaaaaatatcgatcacggactgggaatcgttggcatcccggagaaaagcaagcatcagttctgtcttgacaaagtggagggtcaggagaactttcccaccctttttcccttccacagaatccatctgcgtgacaggcaggtccgggtgtctggaacaatgattgagataagcttcataggtacgcccggaccggcaggccttatcgaccttgaactcttttgcttttctgcgccgactgtagcggactttcctggggaggtcgatattcctggccttaaatacgttgtagtcaacgagacggtaaagggtgctctcactgaccataagcgagtccctgttgttggcacagatatggttgagagactggccgcggaagatgagcggggagacaatggagtccagccgacggatatcctcctcggaataagagatgccggtcctggattcagaaagcagttcccgatactccttatgtgcatagtcagcggaataaagatgtttttccagggtgcaggagcgcctgtccgggcagccgttgcagacataaggaggcattaagagcctgctgcaggactcctgctgaaagtccggacaattggcattgcacttgtcacagaaggaacagcgttttctattcgaggaaagacacgaagggcagagggtgctgtgggaacaatctttacggaggagacaggcgttgtaatgtcgcccatagccgccggtcttccggaagaggatatggtttcggacctccctggaaatcgaggtacagtttttgccgacagcgagagcgatctgtttaaaagagcactgctcagaaagcatgtgaacgattgtgattcggtcatcgagggataaatgtgttttcttcataataaaacctccagtcgtagtacccagacccgacagaaggatgatacaaaatttgtcatactaaatgcaacctttaatatttttaaagtaaatgcaactggcagtgtatataggggttgcatttactttgaaaatttacttcagacaagaaaatctatgtaaaatggttcaggaagcttgactaacctgataatatgtgacataatgacagtgtaatgacgtgtcagaataacaggaggtaaatcatggctcagaaaatagtacaggggaacgaggctcttgcaagtaagattaaatttagacgcaacgaactggggctaacgattgaggaggctgcttcacgggcaggggtggggacaaaaacgtggagccggtatgaggcaggcgaatccattcgcagagataaatgcaaagggatctgtaaagcattgaactggaaggggctgccggatcaggacggggaggaagacagtcgtatctccgttcaagaatatagaaaccatgaggcgtggtctcggtttctggaaaacgaatatggcgccggagccgccatatcctttgccacaggcagtgatatactgctggaccagatcgaggaggacatgacagcgctcgcttgtatgcccgccggatctcacatcgggcaattggatgtgtcctggctgcgtgaaagccttccggaccagttcctgatgcagtatgattacctgtttttataccagatgaaatgtactctgcgcaaaatgaggctacgcgcaaacaacggtttggccatgactgctcatagtgtgatggaagaactgctcctctatctttgctatgaagaggcctctgctctggttgaacttagtggcgggatcagtgggcttgaagatgaagatgaagatgacggcgatttcgaagagtgggtatttgatctgttcgatgatatggacatcattagctttttgtattctaatgtttatcttgattcggatgatacatatcatttttcacactggggggatcagcagttttacacagattgaatctgttgactggtgttaaagaaatcaatggacaaagtggctgagaacgggagggtatatatgttcgagacgatggagtggaaggacgtttataagttatggaagactggctgctgttactttccccagatgctttccggctctgtatctgctgaaacaatatttgtagaatataagcaagaaggttatttctacggatacgattggcttcggcatgatgaagtgacaaagcggaaagaactgatagaaaaaaatccaatcagttttatctattttaccaagccagcaaataaaggaacgatccaaacggccgaaatgcttacagaggctcaaaacgaagaagagcttgccgctgtctggatcgccgcaaccgcgaaagaactgtctgagtgcagaggtggatctggtattctgcgccattccgacatactttacatggcagcgtgcaaatttttacaagaccgctattatttgtggcaccacgcaatgaaaagactggttccggaaatcatggttccggattcagttattaaaagtgtcgtctgcaacgatgcagaaccggttataggacttatacaaatgaacacaatgctgctaaaaagcacttggagtattttgcgatattcatccttaaaagaaggcaatttgccggagccttattatcggcgaagcatctgaatgattcgaaaatcaattggagaaataatttatgagtcatcagcatcagaataatataaagatcctttttgtctgtcatggcaatatgttccgggacattccaataggattgaatgaatatgtaaatgaaaaatgcaagaaaagcactgaaaaatcgtgattgacagataaatcaaaattggtttataataaaggtacaaaaaaggcagttcactccagcgagtggcttccagaatattatgtttctataaaaatagtcactattgctctggtaggcgggtgactatttttttgtacctataatcataacaacaagtactccaaacgcaatcattaaagaaagtgtctcatatgtactcatgttataccaccccctttcggagatggaagtaacccagcagtaggaactgcctatacacattatacgaaaggattaactgcctgtaaaggatacaaatggaaaccaactcttgtttattggacaaatttatagtagactttatctgacaaaaatcgaatggagaaacgatttatgactcatcaacatcagaataatataaagatccttttcgtctgccacggcaacatctgccgctcccccatggccgagttcatcatgaaggacatggtagaaaaacgccgtcaggccgaccgtttttacattgcctccgcggccaccagccgcgaggagatcggcaatccggttcattacggaacgaggaacaaactgcgccagttcggtatttccacagagggaaaacgggcagtgcagatgacgaaggccgattatgacaagtacgattatctcatcgggatggagcagtggaacattaccaacatgatgagaattctgggaagcgacccggagagaaaggtctcaaggcttttggacttcgggccaaatccgagggatatcgacgacccgtggtataccggagattttgattctacctaccgggatatctgtgaaggatgcgaggcgctgcttgactacattgacagatgtgacctttaagccgctgaaaatagcaagcctcctgttttccggtactaagcggaagggagaccttttatgaagaggggatgcaaaatacccctctattttcttgtgaaaatatactatcagttgtgatagttgtggatataaattgtgcattatataataagaaaaaagaaacggagtgagcagccttgaatcagtataaaggggaagcgtggctgggagaagagccgcagatcagggaagagtccataactgagaccgtgtctgccgacataatcgtggcaggcggaggtctggccggagtcgcagccgtcaggcgggcggcggagatggggatgaaggttctgctttttgaaaaatgcagatgcgttcaggccagatccggagatttcgctgtcatggacagcagggtagcgaagcgatggggacgggatcatttaaataagacagagattgtcaataacctgatgcacgatatggcctacaaggccagccagaatattttaaaacgatggtcggaggaagccggtaaagcgtttgactggtatctggagggactggaagatatttcgattctggaccgtaccgatcaggttccgcccaagggcgcgaaatgctatattcagccgaggcgtctgcctctgccggagggctttgacaacaacaatgaaaattacaaatgctatcaggtgactgcctggatacgcccgtcacatatcgccctgtgccgcggtaattttgagctggcggagaagacgggaaatgtgacctccttctttaatacgcgggtaaaaaagcttttgaagaattcagagggccgggtggaaggtgtaattgccgaaaccagagagggtagtctcataaaggcttacgcctccaggggagtgattctggctacaggtgattatatgaatgacgaagagatgctgaaacggtttcttccgggaatgctggaaacaccgaaacagtggaccagctatgacctggaccgacagccctccaacacgggtgacggccataagatggcactctgggccggagcgaagcttcaggacagtccccacgcgccctgcgcccatcatatgggaagcgtgttcggcgtagcggatttcctgcttctcaatacccggggaaaacggttcgtcaatgaggacgcgccgggacaacagctgggaagccagattgagaacctgccggataagacggcgtggcagatcgtggacgggaactggagaagctatataccgaaggagtatccgaaccacggctctgtgtgcttcgtcatggaagatgaggaactggagagcggggcggtatatgataagctttgctttatcgacaactacatcgcaccgaagtatgtccggaaagcggtggaggatggcgttcttctggaagcggagacgctggaggagctgattgtgaaaacgggtcttcctgcggatacggcgcttgcgtcggtggaacagtacaaccgtctctgtgagcagggggaggacacggactacggcaagagaaaggaccggctgtttgcggtaaaacaggggccgttttatgcggcaaaatttacaccggcagttatgatcgcggctatgggaggaatccagagtgatgagaacgcccactgctatgacacagaaggagcggtcattcccggtctatacgctgcgggaaatgtgcagggaaaccgggtagccgtggattatccgctgaccgtgcctggcctgagccattcgctggctctggtatacggaagaatcgccgcggagagcgcagtgggggagagccggtaaaattccaaataaataaggcagacaataaatcaatctaaacagcaattcaacataaacagtaattcaacataaatagcaaaaattgcgcagctgcgcatgaaaatggaggaaaaggaatcatgaaaaaaacaggaaaagctgtggcactgatgacggctctggcagtaaccggagcgctgcttggaggctgtggggcggacagtaagacggaagcgggacagacaggagcggcaaagacggaagccggcagcggtacagaggattccgcaaagacggaagcagccgggggagatgctgcagaaggaactgtaaaagaagacatccgtgtcgtaacatattttgcaggctcagatgcctacgcaccggtctggaaagaggtttgtgccgattacatgaaggaccatccgggcattaccatcgtcgatgagtcccagcccacttcaggaagcaacgatttattcaagacgaaggttcaggccgatctggcagcaggcaatccggcggacctggttctctactatacgggcgaggcttatacgaagaccttcgaggacacgggactgttcgtgatgtttgaagatattttgaaggcagatccggaatgggcgggaaacttcaaggagtctccgctggaaaatgtccagtatcagggcaggcagtatgcgcttccgttcatcggatattacgagggaatgttctacaataaggcgctgtttgagcagtacggtctggaagagccaaccacatgggaaaatatcatgaaggcaaacgaagtattctcccagaacgatatcgtgacgctgtccatgtccctgggtatgccgtatatcaccacggaaaatttcattatgggagctgcgggcaaggaaaatcacagaaattattttgacgagagctggggcatcgccattgactgcatcgcagagctttatcagaagggcggactgcccaaagacaccttcacgatctcagaggatgacgtgagactgctgttttctgaaggaaaagcggccatgatgatcaatggttcctggtgtaccgagagtctccagagcaatccggatatgagaatcatctccatgccaacgcttccgggaggaacaggcggcgaaaactgtgcgatcgcgggattttcctctggatggcacatgacaaaagcagccagtgagagaagcggagaaaccttaaaattcttaaaatacatgacttctccggagactatggcaagatttatcgcttatggcggaagcccggccatcgtctgtgacgcaccggagaattccagcgaactcttaaagagcgcggtaaccatgctggagaaggcgcagtatcaggatgcggccctcgattcacaggtcaaccacgaggcatatgagactttaaacaacggaatccagtatgtctgcgaaggccagatgacgagtgcagaggtactgaaacaggcaaaggaactgaatgaatccggtcagtaagacggaaggctcagacagtgatgaaagccgggggctgtgctttagcgggcacagcctccatcgcacgtaagcggccaaaggacgcccgctaagtgttcataacaaggaggaaacaacgtggcactgaaaggtaaaaaatatgtctggatctgcatcaccccggccatgattctgattctggcgtttttgatctatccactcataaagacggttatatacagcttttcttcctggtataattttgcacttaccagtgaatggatcggtctcgacaattacaagcggatcttttcggatatggtcatgcctgtggcatttaagaatacggcgattctgatcgcaggcgtgctaattttccaggtggggtttgcacttctgctggcgattatggtggacagcgcccaccatggatttaaactgtttcggacggtttatttcttccccatcgtcatttccggtacggcgatcggtctgatgtttaccctgatctacaaatacgaatacggtcttctcaactactttgtcacacttctgggatatgacaagcaggtctggatcacgccccggacggcgatctatctggccctgattcccgttttgtggcagtatatcggtttttatttcgtgattttcctgaccggcatcgccaagatcccggaggacatttatgaatcagccatgctggatggcattacaccaatcaagaagattttctatatcaccatcccgatgttaaaggatgtgctggtatccaccgtggtgctcgtcgtttccggctgtttccgcgtgtttgatactatctacgtgatcacgaagggcggccccatgaactccagccagctgctaagcacctacatgtaccagactgcttttgaaaaatacaacggcggctacgccagcgccattgcggtggtgatgatattgatcggcgtattgctgaccatcggacttcgaaaactcctgaaggccgatggtgaagagtaaggagagacggcatgggaaagaaaaaagtaaaaatcagcagtattctgttatacgcggttctcattttctggcttctgattaccgtgattcccattctgtgggtatttgaaaattcattcaagccttcggaggagattctgttaaatggagtagcccttccgaaaaatctggatttctcgaattaccgttccatcttctcctatccggatgtgaacatgttccgctccttcttcaacagcttcctgatatccggaggcgtggtggcgggagtcgtctgtctcggaggcctggcggcgttcggtctgggacgtttcgattcaggcatcggtaaagttgtggatgccggaatggtagcctgtcttctcgtaccggcatttgcgaccatgatacccaacttcgtcacggtaagccgccttcccatccgggagacgtatttcgcagttatcgtgccccaggtggcgggcaacctctgcttcgccattatgcttctgtcgtcctatatgcgctcccttcccaatgaactggatgaggcggccatcatcgacggagcagggccgtttcaggtcttaagacacattacggtgccgctgtcgaagcccatgttcgctacagtgggaatcatggtatttatctggtcctacaatgacctgattacgtctctggtctacatatccgatcagaagctgaagcctgtctgcgtgatactgaccatggtcagcaacatgcacggcacagattacggcgccatgatggcggccattttcattacggtggtcccagtcctcatcctctatatgatgtcccaggaaatggtcatcaaggggctgacagcgggagctgtcaagggttaaatccttagggaaacttcgggaaaatctgcggtagaatctgcggaagtacataaaggagagtttggatgagagtatttgccaatcacattggattcgacaagacggacgacaaaacagctgtactggagctggagaaagaggcggcaaagttaacagcctggctggaagcggatgacggagagaggtatgacgtatccgtaagcggcccggaacggattccggactggtcggagggctgctattacgttctggacttttccgatgtcaggcgggaaggcacgtaccggattgccggaaatgccgacgggaaggcattccggtcagagatcattccgatcaccggatattttctgaacctgcgcatggtgaacgcgtccagggcttatttaaagggggagcggtcttcgggagaatggctgaaggccgaccggaatgtgccgtttaaaggagcgggagagggaacactggatttacatggaggctggtatgacgctgctggtgattttggaatccatttgacccagctgtctcacaccgccgttttcaaccccatgcagtcccttctgccttcctacgtctgtttcgatcttgtgggacggatggaacgggaggagctgcaggactgccggattctgaaaaaggagcttctcgacgaggcgtactggggggctgattatgcgatgagacttcaccgtgaaggcggtggattcatccgttcggtggaccggggagaggcattttccgaggaacagcaccgcacaatcgactatgaatatttccggttcagcggacatgaagaggacaggagctatctggcggagaccattgaggagaagcattacgagacgtgtatgcgaagcggttccggtctggctgtggccgttctggcgcaggcttcacggtatcgcggggcatcgggagagtattcctgcggccggtatctggcggcggccgaagaggcctttcagtatatgacggaacacaatgagcagtattccagcgacggaacgtggaattttctggactggtactgtgccctggcggcggcagaagaactgtatgaggctacaaaatcacaggattacttagaggcatgcaggaggtttttcggagaactggagcgcagtgcgattgccatggaagacggaatctggtttctgtccaggcagggagaactgtattttcatccttctgacgagggattccctctgattacaatgatgaaatacggaagcctggaaccggatgaaacgcggcggacacgggcgatggaactggtggctcaggcgtttgtccatgtcctttccatcagcagaaaaccgtttggctacgcagcatttacgcagaaaacgggtgaggaggaaaggaaccggtacttctttccccatgacacgaaggcggcgccctggtggcagggagagaatgcgaggatcgcgtctctggccgcggcggcactccgtttttcctgtcagaaggaagcggcggagatggccggggaccttcgtaagtttgccggacaccagctggactggatcatgggatgcaatcccttcgacagctgcatgatcgacggcttcggaagaaataacatccagtatttcttccggaaccagtatgattttatgaacagtccggggggaatctgcaacggaatcacgtcgcgggaagcggatgataaggggctggaattcatgatggctcccacagaggaatgtgatgacaactggagatgggcggagcagtggcttccccatgcctgctggtatttaaatgccatgggctggaaactgaaacgggtgaaatgatatggcttccaaatatattgaacgcaaacgaattttagtgaaaatggagaatatcgagcggtatcctctttctatcgttcacgcccccatgggatatggaaagactgtggcggtgcgggaatatttaaagacgacagaggcggactgggtctgggtctctctggcgggctcagagggggaagcggactacttgtgggcgcggctgtgtgacgcgttaaacggggtgaatgaggagctggcggcgcgtttttcggccatcggttttccctacgactgttttaagaccgacgcgctcttagatgttctcatggactatgactataaaaaccatctgattctcgtatttgacgattttcatacgattgaggaaaataatgtgtttgagctgatgaaggcgattgtgcgggaacggcttaccggccttcatatcgtgctcatcaccagggaactggcaaaactggacgcggcggatttatatcagaaacagctgtgttttactatcacggagaaatccttaaaattcaaccgggaagaggtattccggtacctggatttcatggaatgcaggatgagtgaggaagagcgggagcgggtctttcagattaccgacggctgggaatccatgctctatatcactgcaaaggggattaagcagggacttcccgtgggtaagagcgcgactgccgacgacatcatcgaacagaatttctaccatggcttaagtcaggcggaaaaggaggtcctgtggcggctgtcggtcctgtcatcctttacgaagcgcatggcggccgcggtgctggacgattcggagctttacgacgcctttgaaacgcttatcagcaggagtgtattttttgtctttcacgaatccggtcacacgtaccggctgagaaatatactgaaggactacgtctatgagcgggccctgattgaccgggtggattttacggaggtttacagaaagagcggccggtggctgctggcagacggccagtactccaaagccttcgaatgcctgtaccgggcgggagagctggaagagattctgtccattttaaataaggatacccagaatgacaaggggatctggggcagcgggaatatccgtcaggtgtttgaaaaggccggaaaggatctgtgttaccggtacccgttcgcctatttaaaatacttactggcctgcgccatggacggggaacgcaattacattccacgggttaagctctgcctcgaccgcctggaggaatactgccgcggttcggagtatgagggagagatgcgggaactgatcctgggcgaaatttccatggtgcggagccggatttcctttaacgatattgcggttatggcggaatatgcaggaaagagcgcggaattcttcggcggaggctgttcctgcatcgtgaccagggagacggaatttacctatgggcttccctgtatgctgatgggattcgtgaaggagccgggaagtatggcggaggtgcgggacgcctttgcagcggaggggatgagctttgcggaagccaccgatggatgcggaatcggatgtgattccctggtagcgtccgaggcggcgctggagacgggcgcctgggagcaggcggagcttcacgcctataaggcgtattttaaggcgaaggcggcggagcagctgagcatcatgatttcttccaaactggtgctggaccgcctgaatctgattcaggggagtagcagggaccgcattctgtcgaacagcacattgaaggacgaggtgattgcggccaataatccggttttaaacactacctttgatttatgcggcgcctatctaaacggatgcctgggatggctggacagcattcccgaatggatcagaaaaggggagatcggaaagggaaagtttttttttcaggggaccggttttttctatgtggtttatggaaaatgcctcctgttaggaaaaaaatacattgaactggattcgctctgtgagtcctttgccaccttcttaaagccgttccagtaccatctggtccggatttacttcctgatttatgagtctgtggccaagagctatctggagagccgtccgagaggcgaggagatcttaaaagaagcgcttgcactggcagagaaagaccatctcatcatgccctttgcagagaacacgggccatgtcaggctgatgctggaggcgctgctaaaacgggaggagagtccctatatccgggaggttttagaggcgtgcagacggtacagcagccagttaaagctttttcacgcctgtgaggtatctttgacggaccgggagctggagattttaaagcttttggatgagggctatacccatgaggagattgccggcgagatctatatttccatcgccacggtgcggtaccacgtgaaaaacatctaccagaagctggatgtgaacaacaaaatactggcgttaagaaaagcgaaagatctgaatttcatataactattaggtcgaatgtatcccgcgaggcgttttttgtgagtgaagcgaagcggaagtcacagaaaacccgaggactgcagcgccaagtcaggctttttctgacttgtgtgcatgcttgtgacgatgagggaggcacgactgaatcgttacaatcttatttaataaaggagaaacccattatggagagcaatgcgcatattgtagaatactggaagacacagccggaggttctggaggcgtgtttaaagaacagcctgccgcttacggagaattttgtaaagctgtatcaggaagtcagaccgacccatttatacctggtgggaagcggcacttccttaaatgcggaggaaacggcggtctcctttatgaaagagatgctggatatcgatgtgatttccatgccgtcatcctacgtacatgatatccgtggagaccggccgatgtttgtgtttctgtctcagggaggttcctctaccaacaccttaaaggcaatggaggagacggcagcgtatccgtttatcacggttacgggggaggagacgtgtgagattgcgtcccgaagttcctgccatatggtcatcggatgcggggaagagccggtgggaccgaagaccgtgggctatacggcatcggttatgatcctttatttaatggccatggaggccgggagggccgtcggagccatcggagaggagaagtacgcttacgtacgcacggttctcgaaacagggatcgcccatatgcggtacaatatggaagccattgccggatggacggctgatcataaggagaagcttcagtcgattgaaaagtatatctttatcggccatgggacgggagccgcggcattgaaggaaggcagcttaaaggttctggaaaccattaaatatccggctttcagctacgagtttgaagagtatttacatggtcccatccttgcggtggacgcctgtacgggggcatttctcttcctgtcaggaaagccggaggagcgggaacggttcaggcagctggcggagtgtcagagtaagtactcccaatacaccttcctgattaccgatgaggaaggggagacggacgggaatgcgttaaggatcagaaagacgggagccatgtacacggaagtctttgagattgtagtgattccccagtaccttgccgctgtggtccagggatacttaggcatcgcggacggttcgcccctgtacgacgagtatacagcgctctgtccaacaaaattcaggaatggtaaatagggtgacaatatggattacgtattaggaattgactctgggggaacaaaatttctcgtaaaagcggtgggaatggatggaagggagctggcggagtatgaagggcatccggccgggctgtaccgtttttccagaaatgaggcggtacgcaccatacaggacaatttagagatgtgcatcgggcaggcggggctcaccaaagcggactgccgggcgattgtctgcggcactaccggcatcgacagcgaagaggaccgccaggaggtggaggagatctaccggctgcttccgggattttcctgccccgccctgtgtgtgaatgatgccgaggtggctctctatgccgtgaccggagggaccggcgtcgttgtgatctcagggaccggctccatcgcgttcggacggaacagcagcggcaggaccgggcgctgcgggggctggcctccctgtatcttcggggatgagggctccggcgcatggctgaacttaaaggccctggagtatatgagccatgttctggacggaagaaaagagagaaccctgctttacgatctgctgaaccaggaattgggaatcgggggagcaaaggatctgatccgtatctgccagagaatcgaacgggagaacgccggcttcctgaagctggggccggtcgtcatgaaggcgctgcgggagggcgatgagaatgctgtggaaatcacccgcctggaggcagagctgacctttgaactggcggattcggtggtgcagaagctggaaatctggcaggagccggaatttacagtcggcgcctggggcagcgctattgtgaaaaatccgtatcattttgaactctttaaggaacagtttctggcgaaatatcccaacgtgacggtgactgtggccggcagggatgcagcgtacggagcatgcaggattgcgcttgatgttctgggggctaaaaccggaatctaccggttttaggagtcagtcaggtaggagaatccaggaactgttactgaacggcggatgaaattcatgaaacaccttgacaatcaccggaaaaatcgttatgcttaaaaagattatagatatatataacgagtataatgacttggacaggtaaggaggtgtggcaatcatgaacgacagtaaggttacgccgctgtaccagcaggtgaaagaagatataaagaatgcgattgagcagggacgatacaaggcaaaggagaaaattccatcggagcctgaattgagcgcagagtattcggtaagccgcattacgcttcgccgggcggtggaggaactctgtaatgaaggatacttaatcaagcgccagggtcagggaacctttgtcagtactccgcgtatccatcgcaagatggcgggcggaaaccgcatggagagttttacgaacacctgcaggaattacgggatgaaagcgggggccaggcttttaagccggcagattgtacctgcgcgtcaggaggaacaggagttttttggtcttggaccagatgaccttttagtatacgttgagcggctccggacggcggacggactccctatttttctggaaaaccagttttttccgtatcagaagtttaaaggtctgatggaggagaatttaaacgatgtgtcactgtttgaggtgattgagaggatttcaggaaggaagccagtggaaacaacgagaaggacactggagatcacgcgggcatctgtggagcaggcgcagaagcttggaatccctctgggggaacctctgatgtttttaaacagttatttcattgatcaggaaggaaaatcattatgcatcgggcgccagtattatattggaagccgttatatgttcgacttataaatagtagcataaggttcgccggttcagtcagccggcggttaaaagtgccgcaggacagccagttttggctgttctgcggcatttttgctgaagaaaaagattcccgtgcagggagttaaaaggttcctgcggagtacacatggaccggtaagcggatgctgcgtttagaaatacgacgtgacggaaaattaaaaaatgcatctgtccccctgatttgtcagcttcgtgtcagggtataggtgtatgataatataaaattcacatttgataaaaaggggcggtgtttacgagtacgattggttatgtaaatatttctcttgaaatttggggggcaattctctctttggtgtttatacccagtctctatatggggggaaatggtaaggacaaaacgggacgggtgtttatcggaattcttttatgcaatgcgctgctgctgatcagcgatgcgtcggcgtggctttttaaaggtcatggatcgcttctgtgctactggggagtgcgtattgccaattttttagtttacatacttgggtatcttttgatggcgctgtttacggaatatctgaccggttacctctcaaaaagaatacaggtttcccgccgtgccgccaggtttgtgtgggggatctgtatgatcggaattgcctccacgatattgtctcaatggaatcatatgtattatggatttgtgggctgtaatgtctatagccgcggagactggttctggctgtcgcagctttgggggcttgtgggaatagcagtggatatcggactgcttttcgtttacaggcagggacttggaaagaatgaggtgtgggttctgctatcctatattatcctgccgctccttgccatgacggttcagattttcatttacggcatcgcgtggctgtatcttgccaccacgatttccatcatctttgtttatgaaaccctgcaggccaatcaggcccagaaacagagatggaaggaaatggaactggaacagtcgagaacggcgattatcttaagccaggtgcagccacatttcctttataacgttctgcttggcattaaacagctttgcgacagcaatccgaaaaaagcatcggaagctctggagcatctggctttttatatgcgcagaaacttaaattcactcacccggaaacagctgatcccattcgacgaagagatgtgccatgtgaacgattatctgtatctggaaaaaatgaggtttgaagaaaaacttacggttgtcctggatttggaatatacagacttttttctgccggctatgacagtccagccgattgcagaaaatgcagtgcgctggggaatcacgaaaaagaaaggcggcggcacgcttacaataaaaagtcagttaacaggggaggaggtcatgatttcggtcatggatgacggcgcaggctttgaccccaatgagattaggaatgacggaaagactcatgttggaattgaaaatgtacgccagcggctcatgctgcagtgcggcggaacgctctcgatcagcagtaaaaagggcagcggcactaccgtaacgattcgtttgccgcagaaagggagaaataagtgaatattattgtagcggacgatgagaggttatccgtggagtatatgctgccgcttctgcgcagactggagccggaggctgaaattaccggatttaccgaggcagaggacgtatttgaatatatggaaagaaaccgggttgatatcgcttttctggatatcgaaatgggggagtacagcgggatagagctggctaaaaggtgtattgctcttgcgccgtgcgtaaacattatttttgtgacgggacattcggaatacacgcttgacgcgtttcagcttcatgtcagcggatatctcttaaaacctgtgcggtcagaggatctgcaggcagaacttgaacatctgcgtcacgtgatcccgcggcatcacatccgggtgcagacgtttggatttttcgaggtatttgtggattctgtgccgcttaaatttaccaggacaaagtgtaaggaatgcctggcctatctgattgaccgccgcggtgcgcgggtcacgtatgcggatctggcagtcattttgtgggaagcccgcacgtacgatccgtctgtacaggccaatacccagaaagttgtttcggacctgattaagacactgcgggaagcaaatttagaggagcttgtcatcaaaagcagacaggacatcgctatcaacaggtcacttgtggactgtgactattatgcggtgctggatggggatacatcccggcttgatgcttttatgggagagtacatgtctaaatacagctgggctgaatatacggtgggcgaacttgtcaaattaaaagaaaaggttctgggggcagaccggggataaatggataccagatcagggagaggtcaaatatgaaatcaatacagacaaaatttatcatattaattttaagctgtgtatttgtctgttctgccgtgataggcggagccggcatcatcagtgcagaacgggtggtagatgaggattccgcccaaatgatgaactaccggtgcagccagctggcgtgcgaagtggacgccatgctctcccggattgaacagtcggttaaaaccctggctgtctatacggatgaaaacttagagagtgtggaacttttaaaaagtgacggcacacgaaaggcatttacggagcagatagagtctgtcgccgtcaatgcggcaaacaacacagaaggagcggtggcggtatatgtccgctataatcctgattttactccgccgacctcaggggtgttctggagtaaaaccaatttaaacggaacctttcagaagctggttcccaccgatttctccagatacagccctaccgacgtcgagcacgtaggctggtactatatcccggttaaaaacggcagggccatctggctgagcccctatacgaatgaaaacatcaacatacagatgatttcctatgtcattcccatttataaaaacaatgaaaccgttggcgtggtagggatggacattgatttcagcgtcatcaaggacatgattaacagccttcggatttatgagagcggcaatgcatttttaaccgatgataagggaaatgtcatgtaccataatgtttatcctttcggggttccgatggggagtgtggacaagagtctgataccgttggtagcggaactggaaaatggtacgagcgggagcagcctgttttcttacgtcaatgaaaatgtggagagaaagctggcatttcgcactctgcgcaacggaatgcggctggccgtgacggctccgctgtcggaaattgacaaaaataaaaatatgctgctgatgcagattgtggcagcgttgttggtgatcgccccgctttccgtattggtgacggtgctgattaccaggcgcatgatacggccgcttaaggaactgaatgaggcggcgaagcagatcgccaaaggggatttaagcatttccctgactcagcagaccaaagatgaggttggcactctggcggacagtttccagcagaccgtcaatcacctgcaaaaatatattaattacataaacagcctggcctaccgggatgcgctgacgggcgtaaagaataagactgcctaccaggaggcggaacggcgcctggaggaacagatgcggaatggacggccggaatttgcggttatagtactggatatcaacaacctgaaaaaaatcaatgatcattacggtcatgattttggagatatgttcattgtggatgcctgcaggctgatctgtaagagcttcccgcacagcccggtttaccggattggcggggatgaatttgtagtaatcctggaaggcgctgattatgctaattgtacgcatttgctggaaagcttccacgatgcaattgaggagtacaatcgaagtgaccagcaggataagcacttatcgattgcaaggggaatcgctgtatataacagcgtgaccgatcttgtcttttccaatgtttttaaacgggccgatgatgccatgtatcacaataaggcggatatgaaacggaaacgtgttgcggcggaagcagaagaaaatggcgaaataacgacagagaagaactgacagaaagaatgccgggagcgccggataacgatatcagatcaatagaaagaagaattctcagcaagaccagagcaggtgaattaccggatcagcggagtggagtgcggcgctcacaagccggactgaggatatacgctctgaagccgcgccacggtgaaccgattgatcagagcgtctgtatccgggggtttccggtttgtattaagaggggagaatttggcttgtaggtttatccgtggtgttctataatgttagaggatgcagagcgtaagacagagagttgcagatatgaggaggtacaccatggattggaatacactgctgtgtgaggacagaatcagaagtctggtgaagagaccgtcgggaatggatttaaggacagagtttgaaaaggattaccaccgtattattggaagcgcatcgtttcggcgcctgcaggataagactcaggtatttccgctggaccgcagcgattttatcaggacgagactgacacattcgctggaggtttcatcatttgccaagtcgctgggccagaacatttctgccagtatccggactgtgattcaggacgagtcgtttctgccggagcatgcactggccgtatgtgatattttacagtgtgccgggctgattcatgatattggaaatccaccgttcggccactttggagagaccgccattcaggactggtttaagagaagacttccggagcttcgttatcagaagagcggagagagggaggcgcggccgctgactgaggtactgaaccgccagatggtggaagatttctatcattttgagggaaacacccaggcgctccgggtggtgacaaagctgcatttcctggtggatgagcacggcatgaatttgacgaaggcgctccttgcctccatcattaagtacccgggatcatctcttgaggtggataaacacagtggggatattaagacgaagaagatggggtatttctatgctgaccgggaggcatttgacgatattcaggcttcctgcgggacgaatggagccagacatccgctggcctttattctggaggcggctgatgatatcgcctatgccactgcggatatcgaggatgcagtaaagaagaactgcctgacctttgaacagttggtccgggaactgacggagtataagaaagagcgtcagaacgaccggtaccgcgacatggtgtcctggctgacagacaaatacaaccgggccgtcagtaaggggtacagccgccccgatttatacgcggtccagaactgggtggtcaccatgcagggccagatgattggaggagctacggagggctttacgaatcattacagggaaattatggagggaacgtataagaaggagctgacttcagggacagacgccgagcttctcatggaggcgctgggagacatcgcctaccgctatgcgtttgtgtccaaacccattctgaagctggaaatcgcagcggagactattttcaatttcctcctggataagtttgtggacgcggtgatttactttgatactgggaaaaagcagagcgcggtacaggaaaaactggtctcgcttatctctgataattacaagaagctgtattttatctgttcggatgggaagagcgaggaggaaaagctgtatttaagacttttgctggttaccgattatgtgtgcgggatgacggacagttatgcgaaggatttgtatcaggagttgaatgggattgcgtgaaaaggcacggttttccaaagggggttgaaacgtgtccgccgcctgaggattgaaagcggtggacacgtttcaatttgagtcataaccggccttacagaattgaagttatgcctttacaggaatttcctgaagaaacggcactcctccgtgttgcatagccgcgcttcctccgtgcggatattcaaatggaatacatgaccgatttcttttttctccggagcaccgtataaatggtactcgcaggggactcctttggagcgcagcagttgataaaatggttctgcccactgtttcagaaaatcatagtgcgaggtcatgataaatgcaggaggaaatctgtctgtaaaagcctgaatggtatcggctgtatggaaggcgttctgttcttcctcaggaagatactgtttgattggcgcatttttcgtctcgtttacatattttctgacgtcgtacacgccgcagttaagcgcggcagcccggacacggagctttcgcgggagagaaaatccgaataattctgcataggcttcatttgtcagaatggccaggtactggcttgcaatctgggcaccggcggaatctccgactataaatacacgctgtaaatctattcgatactgttcagcctgccgctccatccataagaatacggagtttacatcctccaaagcggccggatagaggtgctccggcgccagccggtaggaaaaattaactacggtaaatcccatctgcgccaggtgcatggtgtaatactggtagacatccttatccccgtaaacccagccgcctccatgtacgctgacaatgacaggaagattttcggaagttccctttttataatagacatcaagtttattccatacaaaatcactgccgtaggaaatatcgttaaaccgcaggatatctgagggtgttgtaagcccttcatctctttttctgtccatttctccaaactggactctgatttcttctgccattccattcatgtctcaagttcctttcattgatctgtattaaaattcaaaccgtttcctgttttaaagttcatcaagcttcaaagttcatcaagttcctgagttcattgtaattcagatctcattctttttccgaactctgagttatccggtaattccagtgcaaaccgtttttccagccagcacccggcaagttctacccattttgctgcatcggcagagagctgcctttttgataatgctgaggcctgagtggaaacgctcagaccgtgagaacctttttcaaaaatatggatttcaaaaggtactttgtggtctgccagtgcatgagccatccggagactgtgctgaacagggaccagtttatcctctgaggttgcccagatgaaggcgggaggtgtatgttccgtaacaagccgggcaggacttaaggctcgtaaaacctcctcctccggctgcgggctgccggataaaacggttctggcggcatagaaaatcctggcccaggctgaccgttccaaacattcattccggtaaagatagtcgcttaacgtataccctaagatcagggcggccggacaaagcttttctttttccgcattcagatattcggtgatcagaggcttatcccagtatacaccgtacatggcggcattgtgcgcgccggcggaaaatccgcagacggcgatgcggcttgtatccacaaaccattctttggcgtgttcacggatagagagcatagccatcccgatttcacggaccgggccggggtgccggcagttctcttttggaagcagcggagcggataagtccggataagccatgtccccttccccataagtggagtaccgcagaacaaaagcgtgatatcccattgctgtaaactggagggcgacaggctcagcctccctgtcagtgcagttcatatatccgcctccgggacagatcaggacggcgggacgcggtccctgctgattcatttcccctttttctgcgataacataggctgtaagggttacatcagctctgtcttcgtataacggaattacttttgtgaccatatgatttctcctctattcttcagcttttaatttttccagttgtttttccacgtccagaaagacagccgatcccattaaaattgccgcacagatcagcggaacgatgctgtaacaggctcgttctgcaaagagagcgccggcgctctgcgccatgccgctgtttgccgcttccgcgctgtaatttccgattgccagtatccagcctaaggaagcagaccccagtccgactccaacctttactccaaagccggtcagactgtgtgtcagcccggttacggttacatgatttttgatgttaatgtaatcagcgacatcggaagtcgttgcaaacagcagggaagtacttaaaccgacgccgattcccttacagatcattcctgcaaatatgacaggcagttgatacggaaacagactgattacagtatatccgaacatcaggaatccggctcccatcattaacgtatttctctttccataccttttggctgccttcggaacgattccaagagccaggataatgagggagggaagtgtacccgccatggacagcggtgccattaaactcatatcctgcaggacgtccctcacaaaatagacgctggcgccgccgcttcctgtgagcataaaccatgtaaagacaaatgcaatcagtgttaaaaatgtgtatttgctgctgaataagagctttacatcctgaatcagagaggaactgttcttattctccatttcggccttggttgtaattttatattctttacaggtaagcccggtaattaaaatgcagatcagagcgattacgccatatatgattgacattgccgtgaaccccttctgcccgccgccgaatcttgccatcaaagcaacgctgtagctctgcgccagcagcattgccagggaagagcagaatgatcttgcgcttgtgaagcctgtccgctcctcaggattcggacatatcagtgtgaccagcgtgctgtaggccccgtttactgcagtgaagcatatgacactgtagaaaatgtaagtgaccacaacatatatttttgttgctgtgtcactgaggccagagggcacgttcagcatcaaaataaaagacaggattaatggaaatgcggagaacaaaacccatggtcttgctttcccgtattttgtatacgtcttgtcaatgatgattcccatgatgatatcagaaattccatccagaagcctcgtaaacagcatcatggttccgataaaagcagcgcttaaaagtacgctgtcggtgtaatacatggtcacaaaagcgcctgccgcggcacttaccagattgccacctaaatctccgatgccatagcctattttcttccccataccaaaattgttctttttctccatactactttgcctccattgtacatgttcccctgttaccgttttcatcatagacggccacggtaatgattccaggtctgtgtgctttgatgatcaggagcgcttcccctaaaaaagcatggcagctgtgggctccgatctgatcttctgtgcaggggcttccgctcccaattgcgattaattctgcatgatccgaaagctctgcggttaacagccgttcatcctccggatatgccgttccattttcatcctgaatccggatctggatatagcctggatcacatccattggccagaatctccgggacttcgggctttaaagcaatgacagcttcctttcccacagttcgcagtactgcacggctgatttcttttccgttccggtacgatacggcttccaaaattccgggagtataaggaatatctatggcggcggtcagcttttcatagtttataactcccataaccttcccatttaaccggaattctgcctctgtccctggtccgtatgccagcacagagaccatacgccctgtgtattcctctccaaatgaccagtccgcatggacgtccggccagtgccagccggttccgtagtactcgtccccgtagtgattcggatgtgtggtaaagagataagtctcatttgtatggccccacatcagttcacggtaataggactggggccgacggctgccggtcatcataatgtctgactgccaggaggttctccagggatacggccccatgaaggaaaatgtttcattttcttttttccagtatactctcccgacaccggcttcccccagatagtcaatggcagcccagataaaatctccgatgacccatggacaggctttcgtcttttcccagtaatcccaggtggtgaaggaatggctttctgttcctgccatgacccgttccgggaagctttcgtgatctttttcgtatctgtccgggagataattatatcccgttatatcgaggggggcagcgtattcccgcgttttttctccccagatatcgcgtgcatctgtttttacgtttgcatcaaagtttgttccgggttccctgcccggctcaaagatattacagattgccgccatgactggtcttgtggaatctaaggatttcactttactgcttaatcgccgcgaccatttggctccgtcatttctgccatcccgctccccgatttcattgccggtggaatagaggattacgcagggatggtttctgtcacgttttaccatccattccatatctctttcccaccagtcctcaaagtacaggtgataatccatcggccgtttccccatgcgccaaacgtcaaaacactcgtctaacagcagcattcccagccggtcacacgcttccagcatggcaagcgacggaggatggtggctgatccgcaccgcgttgtatcccgcctcccggagaagacggattttccgttcctcagcccgaggatatgcgcatgcacccagcagtccgttatcgtggtgaatacaaccgccttttaactttatggcttttccgttcagtcggaatccctgttctgtatccacagagattgtccggattccaaagctttgtttttccgtatccagcgtgtgcccggtgctgtccatgacggtaatgcggcaggtatacagatagggatcatgaatatcccatctgtgcgggctggatatttcagcctcagttttgcatacggcctttcccagcgcggggacaacggccgtgaccgatcgggcagctttaatccggctgtcttcttccgaccagccatttccaagctgtttcttcccgggcaaaggctgattttcatcactccctccctgttcgtccaatacttcgcacagaacgacaagctctcgttcctctgtttctctgctggtgacggtaacgtcaaaatgaataacggtttttccgtccccctcttccgtgacggagataaaggtatcccagggctttaaataaatacttcccccaatccagagcgcagcccctctgtaaagtcctcccccggtataccagcgcgaagaaggctgccggctctgcgtaataatcttcagctcatttttgctgccatcaaaattcaaagcgggagttaagtccacttgatagggggtatatccatagggatgcattccgaggagttccccgtttaatattacttccgtattcatgtaggcgccatccaaatccagaatgaccgtcttatttttcaaactttccggaaaggcaagttcctttttgtatacaccctggccttcccccaaataaccgttcagtgcgccgccggctgcatctgcggaccgtggtttggtgatgataaaatcatggggcagatgaatctgctttgggaccggtttttcgtaaacaaagctcaggctttcattgctttcataaaaactccagtccctgttgcattcgaatcgttccaatatgtttcctcctttcttccgttgatttaaagatacagtaacgcccaaaaacgcatttggctcattttctccgcttatccgcgatgtgtttctgtattgtatttactgtgcctttatcatataatagaagcagattaataaccagatttaaaatctgctacatcctgaaaaacaaggcccaaaaccgacattttacggaggtgcctcctatgagcataaaaaagaattctaagatgaaaaatcagaaacacgtgtctccgattgacttttattccccctcgcagatgagtataccgatgtcttttacgatgtgctataagataaactacgacgctgcccacacgctttaccatgtgatatcgccgggaaatattgacagccatatcagttcagacgcgaaaacaccgcatcagcatgatcatttcgaactcttatatgtgctgaaaggggaactggtcaacaccatcgaacagacctcctatcattataaagagggggatgcctgtctgttgaacaggaatacacgccatattgacatcaaaggcagaaacagtatagccgtcttcctgaatctgtcgacagattatgttgcggagttgatgcgcgattcttctgagacaagtccgaaacataaaatccacctcttcctgtcttccaatcttaaggggaatgaacggtttgcacggaattatctgacttttacaccgacgctgcagtcttatggagacgacactcttacgcggattgccgggctgattgactctgttcagctggaactctctgaacagaagccgggcagccaggatctgatccgcgggctgatcaagcggcttatctacatgctggaagatgagaaaaaataccactcgaattttgtccggctggatgcaacccaccaggattttctgttcgcacgtattatgaattatataaaagaaacgaatggaaatatcacaagagaggatttgtcgaaagcactgaattataacgcagagtatctcaacagaatcgtaaaggcccgcaccggagtcagtatgatgaaattcagaaaaaaattccagctggcgagagcaaaagagctgctgacggagacagatgaaaatatctgtaccattattggagaactgggattttccggaaattctcatttctatacgtttttccaccaggagactggaatgtctccgatggaataccggaatctgtggaaacagaaaataggggaagagagtgaaacagcccaaacagagcgggagcagatacaactgaataaaaattgttaggaaaatatcaaaaacattattgcaggtataaggtttattttgtataattaagatagatcaagacgtaattttcaaagagggattgtgagaaatgataaaactgacaaatctggatgtgaaaaaaatgacgattggccagatggccagaatgaaccatatctcggagcagacactgcggctttatgaccgggagggcctgctttcgcctctgggacgggatgaaaaaaacggctaccgctattatgatatccggcagagtgcccagctggacatgatccagtatatgaaggccctgggaatgccgttaaaggaaatccgtgtccacatgaaaaaatgggataccgggcgtttaaaacagcttctggtggagaaccgggatgcaatcgaccgcagaatcgaggagctgaatttacagaaacgggcaatcgagcggacgttagacagctatgagcggtatgaagcggctcctccggacggctccatcgtgctggagtatatcccaaagcgtcagatgtatgtgaagaacacgaatgtaaacttttatgactatgaaatcgatgaatatgagcggattctccgggatttgaaggaggatatggcggcacacgccatttcgccgctctactttgccaatgcgggaaccatattgcggagagaaaatttcatgaagggacggctctattccgcggaggtgtttgtgttcgtggaccgggaatatgtggatgaggaactcataacggttattccgcccagtccctatctctgcatctactgcgaccggtttgagaaggaaaaggagtatatcgaccggctgctggtggagatcgaagagaagcactataccgtgaccggcgactatatctgcgaggtgattgtggaaatgccgctggattacacggaacgggggatgtttctgcgcctgcaggtgccgatccggatgggggcataccaatatggcgaatcctaaattcttgtgtatccatcacccgctgtccacaccaaaactgcgcatgaaagcggcttttaaggccattccaatttggtgatactgctcaattgacctgataccgcatataagccttataatgaagtcagcatatggggcatggccctgaaactgtcgactttttatttgagattttatctaagaaaggaagcgttgttatgatgaattatgagaagattcgtgtggtacagtacggctgcggcaagatggcaaaatacatccttcgttatctatatgagaagggcgcggaaattgttggcgcgatcgacgtgaatccggaagtggtcggaatggatgtcggtgaattcgcggaactgggctttaagctgggcgttacaatcagagacgatgcggatgcagttctggatgagtgcgacgctgatatcgcggtagtgacactgttcagtttcatggatgactgttattcccattttgaaaaatgtgtttccagaggcattaatgtggtgactacgtgtgaagaagcgatctacccatggacaacttcttccgctattacgaataaactggacctgcttgcaaaagaaaacggctgcaccatcgtaggcgccggtatgcaggatatctactggatcaacatgatcggctgtgtggcaggcggcgtgcaccgcatcgacagaatcgaaggcgcggtaagctacaacgtggaagattacggtctggcgctggcggaagctcacggagcaggactgacaccagaagaatttgaagctcagatcgcccacccgacgacgctggagccggcttacgtatggaactccaacgaggcgctgtgcaacaagatgggctggacaatcaaatcccagagccagaagtgtgtaccgtatttctatgataccgatctctattccgcaacacttggaaagacgatcccgaagggaaactgcatcggcatgagcgcagttgtcactacggaaaccttccaggggccggtgatcgagacacagtgtatcggtaaggtctacggtccggatgacggcgatatgtgcgactggaagatcatcggcgagccggataccacgttttatgtaacgaaaccggcaacggtagagcatacgtgcgcgacgattgtcaacagaattcctactatattgaatgcaccggccggatatataacggtggagaaactggaagagcttaagtacctttcctatccgatgcatatgtatctggagcattaattcaaacgggcagatggcagtgcccatggatatggatatgtttagcgagggtgaaaaatcatcaaaccgatgatttttcacccctgtttttagttcaaaaaaataccggttcagtggaaaacatattacaatcgccttatgttctacaaaatatacataaaaataaattatatattgacaaaattatgcataagtcctataatcatatatgtaatgacatcttgacataaatacatataaatgaaaaaggaggagaaatgaaagggttagcagtccatgaaaacagaaagctgcagattgtggaacttccgatgccggaatataacgaatatcaggcattggtaaaggttttggcctgtgggatctgtaatgggacggattccaagattatccatggaacgtttaagggcgtggatacttatccgatcctgttggggcatgaggcagtcgggaaggtggtagagacagggaagcatgtaaagtatttaaaacccggggacatcgtacttcttcccttcctctaccagaaaacggagcagatgattccaacgtggggaggattttgtgaatatgccctggtaggggatgacagggctttggaggaggctgggattggtatttcttcccctttgagggatggcagctatcctgctcagagtgttatgacttcaaaggatgggatcgatccggcagaaatggtcatggttatcacgttccgcgaagtgttaagcgcgattcggcggtttggattccgtgaaaatgaaagcgtcctgatctacggtgctggtccggtaggtcagtgctttattaaattttcaaagctgctgggcatgtctgaagtgatctgtgttgatattacagatgagaaaacagcagaagccgcctgtatgggagccgatcatgttttcaacagcagaaaaacgaacgttgtccgggaagtcagaaagcttctccctgacggagttgattacgtggtggatgccgttgggcttggcagtctgatcaatgaggcaatggagctgattgccgatcacgggaatatctgctgctacggaatttctcccaaaatgacgcaggagatcgactggagtaaagctccgtacaactggaatctgcagttcgtccagtttccggaaaaagcggaggaggcagaggcccacagccagatcatggcctggattcgggctggcgtgctgaacccgaaggactttatttccgaccaatatccatttgaaaagattttagaagcgtttgaaaaagtggaacagcatctgccggatactaagaaaattgtcataacctatacttaacgatttggaggcggcttatgaaaaaaccagaattgtttttaaaacttcctgaggagtatgtgtgtaccccggatggtatggagatcgaccggaatggaaatttaattctttcctgtcccaattatgcgcaggacgatatgtcaggctgcatcgtccgcattaacagagacaaagaggtggaaaaatggtttgatgttccggttcatccggagacgaagctggcccggaatatgggaattgcatttgacagagactggaatctctatatctgcgataaccagggctggagtgagaaggaggaggtgctgtacaagggacgcattttaaaagttacggcagatgaggatggtaccataaaagagacagtagtcgttgctgatcatatggagcatcccaacggtattcgtatcagaggggactatctctacgtgactcagagttacttacatccggttaaggatccatccggaaagcttgtgagctgtgtgtaccggttccggcttgatgagcacgacgtccatattacgaatactctggaagatccaaacattctgacgacattgattacagagaatcctgagtgccaatatggggcggacggaattgcctttgattcgaaaggggacttatacgttgggaatttcggtgacggtaccgtatggaaaatcactttgaatgaggacggaactgtaaaggagaaggaaatttatgccagagatcccgaggaacttgtgagcacagacggcatggtttttgatgatgagggaaatctctatattgctgatttctgtgccaacgcaattgtaaaggttgatcagaaccgcaccgtaaagaggctggctcagagtccggataccgacggttttgacgggggactggatcagccgggtgaacccattatctggaatggcagcttgattgcttcctgttttgaccttgttacaggcccgggaaaagtaaatacgagacacgaaatgccggcgacgatgtcggaaatcaaactggatcaataataattggaggatgtacaatgaaaaaaaatatggagaagttaacagcagtttttatggcagcagtaatggcggcaagtcttttaagcggctgtggcagtaagaaagaaactgccccggcgagcgttccggatcagacacagggggaagtgaaggagagtcaggcggaaggaacggacagcgaaggaaaaactctgagaatctactgttggaacgaggaattccaggccaggtttaatgacatctatgcggataagcttccggcggatgtaaaggttgagtgggtcatcaccccgactcagaacaatgcctaccaggataagcttgatcaggatctgccaaacaacgaaaaggtagatgcagatgaccggatcgatttatttacagtagaggcagattacatattaaagtatgtggattctgatgtaacgctggatgtcaggggagacatcgggctgacggatgaagatttaaaaaatcagtacagctatactcaggaaattgccacagaccagagcggtaaactgaaagccgtttcctgggaagccgatccaggtgtattcgtataccgccgctccattgcgaaggaggttctgggaacagacgaccctgataaagtgcaggaagcaatcagcgactggaataaatttgaagaggtagctggcaagatgaaggaaaaaggctacaagatgctttccggatatgacgatgcataccgtgtattttcgaataatgttagtgcgccgtgggtaaatgccaatgaagaggttgtcattgatccgatgattgaccagtggattgaccagacaaaggattttacggataagggttacaacaacaagactcagctgtggagtaccgactggaatactgatcagggaccggccgggaaggtattcggcttcttctattccacctggggcgtaaacttcactcttttaggaaatgccctggaaacacctcttgcagagggcggcaagaaggaagccggcaatggtatttttggagattatgcgatctgttacggaccggccagttattactggggcggaacctggatctgtgcagcccgtggtacagataatgcagagctggttaaggacattatgtacaccatgacctgcgattccgaaagcatgaagaaactgacctatgatttcgaagattttaccaacaaccagcaggccatgcaggaaatctctgacagcggatacacgtccgatttcctgggaggacagaatcatatcgaactgtttttaaaggttgcccctaatgtcagcatgaaaaatgtaacggcttatgatcagggaatcacggagtcattccagacagccatggcagattactttaacggccaggtgacgaaggaacaggccgttgataatttctatacatctgtaattgagaagtatccgaatctgaagaggccgcagtaatacacagacagggcggaagtttcttccgccctgtattaacagaaggggaattaagacgactgcgaggagtgataaagtggcaaagaattatttaagaaagaagaaaagcggggtcaattacgacaaatggggttacctgtttattatgccctttttcttatgttatgcggtattttccctgtttccgattatctttactttttataacagtttttttgaaaattacatgaacgggctgaaacaggtgggccccaattttgcaggctttgagaactacaagcggattttagctgacaaggatatattgaaatatttctggaacacgatttatatctggatcctggggtttgttccacaaattatcttttctctgcttcttgctgcctggtttacgaaccggaggttaaacatcaggggacagcgcttttttaaaacggtaatttacatgcccaatttaatcatggcggctgcattttccatgctgttctttaccctcttctccgatggaggaccggttaacgacgtaatgatgaaatgggggatcatcagcgagcccattcgttttttggctggccggaatacgacgaggggcctgattggtctcatgaactttatgatgtggtttggcaacacgacgattcttttaatggctgccatgctgggaattgatgtaagcctctttgaggctgcagaatgcgatggggcatcgcccggacagattttcaaaaaaattacgattcccatgataaaaccgattctgctttacgtgattattacttccatggtgggtggaatccagatgtttgacgttccgcagatcctgacaaatggtgaaggggttcccaaccgtaccagtatgacgatcgtcatgtatttaaataaacatctctacagtaaaaactacggaatgagcggcgccgtctcagtgatcctgttctttgtgacggttcttctaagcctggttgtgcttcgggtaatcagggaaccgtctcaggaaggaggggcgtaaggaatggtgaaaaaacagagaaaaccggtaactttccgtgaacttatgatttatattgtgctggtcctgctgacctgcctgtgcctgtttccgttttttatgctgatgatcaatgcaacgaggtctcacaccgaaatccagaagggcttcaccttccttccgggaggggccatattcatgaatctgagaaacgtgtttcacaatgaaaaccttcccgttctccgcggaactttaaacagtctggtcatagccggaggttctgcggccctggctgtgtatttctccagcttaacggcttacggacttcatgcctatgatttcagaggaaagaagcaggcgttttcctttattctgctggtaatgctggttccgtctcaggtttcggctctcggctttctgcgggaaatgctggcgctggggctgcgggattctttcttaccgctaattctgcctgcagtggcctcgccaaccgtggtgttttttatgaaacagtatatggccagcgcagtacccctggagctggtaagcgccgcgagaatagacggtgccaatgaattctatgcgtttaaccgggtgatcatcccgattatgaaaccggcatttgccgtacagggtatctttgcatttgtggcatcctggaataattatttcatgccctccctgttgttggacagcaagatgaaaaagacgctgccgatcctgattgctcagttaagaagcgccgattttttaaagtatgacttaggtcaggtctatatgctgattacaattgcaatcctgccgacggtgattgtatatctgctgctttccaagaatattgtgggcggaattgcattaggaggaatcaaaggctgacaaagacagaaaggaagtgagacggtgggagaatacattctggcccatgatctgggaaccagtgggaataaagcgactctgtatgattttgaagggcggctaaagggcagtatggtatgctcttatgatacgcatttcaaggaggaaggctgggcggaacaggacccggaggactggtggagagcagtctgtacctctgcaaagggtttgatggagacgacaggggtatcaaaagaagagattgcctgtgtaagcttcagcggtcagatgatgggctgtctgctgattgacgggaaagggaagccgctgcggccaatgatcatatgggccgatacaagggcccgggaacaggaaagaaaaatggtggaagccgttggtgaggaacggggatataaaattaccggacaccggctgagcgcttcttattctgccgcaaagcttttgtgggtgagagaccaggaacctgctgtctattcgcgggcggctaaaatgctgaatgccaaggactacatgatctaccggctgacaggtgaaatcgttacagattacagtgatgcctccggaacgaatcttctcgatattacgcagaaaaaatggtcggacgaactgttggagtgtttcggtatagaacggaatttattaccagaactgtatccatcttccaaaattgttggtataataacggaagaggctgcgcgtgaaacgggacttaccgcgggaacacccgtggtggccgggggaggagacggctcctgtgcctgtgtgggcgcgggagttgcggcggaaggaaagacctactgtgtactggggtcctcctcctggatttcagcggcagcagcgaaaccattttttgatgaagcgcgcagaacgttcaactgggtccatctggatccggagctctatacgccctgcggcaccatgcaggcggcagggctctcgtacaagtggatcagggatgtcatgtgcggggaggaaaggaaggaagcaaagttcatggggatcgatacctatgaactgcttggtcatctcgcagcgctgtctcctccgggagcaggcggtctgctgtacctcccctacttactgggcgagcgttctcccagatggaattcagacgccagaggctgttttgtgggtcttggaatgtccacagagaaaaaggacatgatcagggccgtactggaaggcgtaggttataacctgaaagtaattctggatattttagaaaacagggagcgcgtggattccgttattttaattggaggaggagccaaaggcagagaatggctccagatccttgcagatatctggcagaaaactatttctgtcccggcttatttagaggaggccacatccatgggagcagccgtatgcggcggcgtaggaatcggtgcattccctgatttccgtgtggtggagcgcttcaaccggattgtggacgagatcaggccggataaaaagaataccatggtatatgagcggatgtatggagcctttaatgaagcgtatgatgctttatgttctgtatttccttctatatctgtaaaataaggaggtcactgtggactgggaaaaggttttcaattacaggagtctggataagcttctgcctatcccgatgtattatcagattaaacagatgatactggaggcaattaagaacggaactctgaccgttggagatatgattccggcggagatggagttctgcgaattctgcagcgtaagcaggccgacggtaaggcaggcactcagcgaactggtatcggagggatatttgaccagattgaagggaaaggggacctatgtctccagacccaagattcaggccatgttttttaacaggctgttaagcttcaacgaggaaatgaaagagagaggcttaactccttctaccagggtgctggcgttaaaagtagttccgggctgtcccgaggcctgtaaggttctgggacttccggatgacgggaagatgattctgcttgagcgtattcgatacgccaatggcgatcccctggtttatctgtgcacctatctgccctacccggcctatgaaaagcttttggactgtgatttcgtagaaaattctctgtataagcttctggaaacgctttacggtgaccgtgtagaacgggttcaccgcaccatcgaagcggtaaacagcgagaaaaaggatgcggaacttcttgaaattcccaaaggttccgcagagtgtcttgtgaaaacagtcggttacagcggacaggacaaaccggtggaatactccatcgccagataccgcggagaccggaaccagttcagtgtggatctctaccgataaacgaaacaggagaaaagaatggataagagaaagaaagccgcaatggctttactctgtatgcaaagatattcctgggaacagggaactgccatgcaggccttcctggaatcaggtgaagatgagattgtactaaagatggcaaaggaagcggtttacaggagtattgaggacggccgcgctgcgattctgggaacgcttgaggcggtaacagatccatgctccgtcggggaggctcttgtctatgctgttgcaaaaacacaggatccgtttttggaggaaggcctgaaaaagcttataaactgggctctgaaactggctcccagaagtgaggacggagcagtgtaccatgtgatgagtgaaccgcagatctgggtggattcgttctatatgctgccgccatttttagcggcggccggatatcccaaagaggccgttgatcagatccatagatactggagccgtttatacctgccggataaaaaactgttgggccatatctgggatgatggaaaaaaagaatggatcagacgtgactgctggggcgtgggaaatggctgggctatggctggaatcgcaagagtcattgaccttcttcccgacagctttgtaaaggagaaggaggaactggccgcgcttgacacggggctgatcgaagcggtatccgcatatatcaggccggatggaatggttcatgatgtactggataatccggatacctttacggaggtaaatcttccgcagatgtttgcttatacggtttaccggggaatgagttccggatggctgaatgagaaatatttggatcaggcgggactctgtctgagtacagccagggctcatattgatgattacggatttattcaaaatgtctgcggagcgccggattttaacaaggccggaatggcgccggagggacaggcattttatcttctgctggaaacggcagcagaaaactgggaaaggaagtccgggcgcatgctctgacagaaagggtgagaaaatggaatatacaaaacttggacgatgcgggctacgcgtcagccggttatgccttggcaccatgaatttcggttctgggacagaggagaaagaggcatttcggattatggatgccgcgctggatgccggaattaatttttttgatacagcgaataattacggctttttgacgggaaatgagggaatcacggaggagatcatcggccgttggtttgcgcagaagggctcccggagagaacgtgttgttttggctaccaaggtacacgaggatatgaaaaatccggaggatggaccaaactccgcagcagggctttccatatataaaatcagacgtcattttaaagaatccttaagacggcttcagacggaccatgtggagatctattatatgcaccacattgaccgaagcattacctggacagagacctgggatgcattccagaatctctatgacagggggctggtcgattatatcggagccagtaatttcccggcctgggagattgcacgggcacagggggaagcggaaaaacggaactttatgggaatctccgtagaacaggaccgttataacctgacctgccgcctgccggaactggaggttcttcccgcgtgtgaggcactgggagtcggtttcgtagcctgggctccattgggaggcggaatgttagccggaaagagcgaggattctctgcgccgcattggtcttgcagacagtaatctggagaaggcagaggcatacaggaaggcatgcggggaggctggtctgaaagaagcggatgccgcacttgcctggcttttgaataatccgcgtctgacagctccgattattggaatcagaaccatggaacagttaaacagcagccttcatgcactcgatataaagctttcgcaggattttgtggaagaactggatcgtatctttccggggccgggcggtccgtctccggaagcatatgcatggtaaaaggagaagacaaaatgaacgtactgaaagatttgacagcagatagtctggcacaatattttgatcatacacagcttcatgccgaggccacggagaaagattttataaagctgtgtgaggagagtaaaaaataccattttcggatggttgccattaattcggcgccggtggcactgtgcaagggacttttgaaaaatacggatatccatgtgggggccgctatttcttttcctctgggacagacctccataccggtaaaggtcttcgagacagagaatgcgattgaggcaggggccgatgagattgattatgtgattcatataggtaagctgaaggatggcgactacaattacattgagcgggagatggcggagattgtctctgcatgcagacgcgcagacgtaatttccaaggtgatttttgaaaattgttatctgacacagaaggaaaaggaagaactctgccatattgctttgaatgtgagaccggattttgtcaagacctccaccggattcggaacgggaggggcgactgccgctgatgtaaggctgatgaaaggcattgtgaaagatcatatcagggtgaaggcggccgggggaatccgtaccctgaaggatacgctggatatgatagaagcaggcgcggaccggatcggctccacggccagtaccgcgattgtagaagaatttatgagaatgtaaataaggagtgagaaacaatgggatttcctgaaaagtttctgtggggaacggctaccgcctcctatcaggtagagggaggctttgaagatggaaggggatatacggtctgggacgatttctgtgccataccgggaaaagtgctggatggaagcgatggaagtatggcctgcgaccattatcaccgttataaagaagatgttgccctgatgaaggaactggggtttaaagcttaccgtttttctattgcgtggtccagaattttgccggagggaaccggagaggtcagcgaggcaggcctgcagttttatgaaaatctggtagatgaactgtgcgcgaatgatattatcccctgtgtcaccctgttccactgggacttaccctatgcactgtaccgcaggggcggctggcagaatccggacagtccggagtggtttgcagagtataccagggtggtggccgaacggctgggcaaaaaggttccttactttatcacgtttaatgagccccagtgttttattggcctgggacacgttacgggggaacatgccccggggaatttgatgtccagaaaatcagttctggagatgacccatcatgttctgatggcacatggcaaagctgtgaaggtgctgcgggactatgctccagaggcaaaggtagggattgcacctacttccactgtggcgtgtccggcaacagagaagccggaggatgtggaagcggccagaaaggcctatttcgatgtgattgatcaggaaaattatatgtggagtgtcagctggtggagcgatcctgtctttttcggaaaatacccggaagagggcgtgaagctgtttgccggtgatatgccatgtatcggggaacaggacatggaactgatcagccagcctgttgacttttacgggcagaatatttataacggatatccggtggcgtctgatggaaaaggaggctattcctgtctcccgaggaaacggggcgcttcaagaaccgcctgcggctggcccgtggtaccggaatctttatactgggggccaaaattcctttatgagagatatcataagccgatttttatcacagaaaatggaatttcgtgtacagacagtatctgcctggatggaaaggttcacgatgcagaacgaattgatttcctgcaccgttaccttctggcgcttaaaaaatgtgtagaagaaggaaatgaagtggaagcgtattttgtctggtccctaatggacaattttgagtgggcgaagggatatacagagcgcttcggactgatccatgtggattatgagactcaggtgagaaccatgaaagactctgcctggtggtttaagaagatgatggaatccaatggaaatgacttgtaacgtattttttagtatgaaaatatcaaatctgcgattataaaatgacggggtgcggtggctgcatatacaggctgccgtgtcccgcctcttttgcttttgactgtcatgccattcctgtaatacggctgctttcccatcatattttttaattgaccgtacagtgcttgacgaaaccgccgattccgtttaaggtagtaagaagcatcacagtttgacccattgataaaggagagtaaaatgacgtttttagagaagcaccccatgattatgattgtgatcgggatcatcggcatatccctgtcagcgatatttgtgaagtattcggaggctccgtcggtcgtgacagcggcttaccgccttctttggacggtggcgcttatgacgccggtggtactgggaaagaaggagatcaggcgggaactggcgggctccgataagaagacggtggcgctctgtgcggtcagcggtatttttctggcactgcattttacatcctggttcgagtcgttaaatcagacgtcggtagccagctccacagccatcgtctgtaccgaggtgatatgggtggcactcgggtactgcctgttcttaaaaggccggctttcaaagaccgcggtgggaagtatcgcggtcacggttgcgggaagtcttctcattgcactgtctgattattccgcaggcggaaatcatctgaccggtgacggactggctctggcggcggccgtattctcggcagtctacacgctgatcggaagagaagcgagaaagcatatgtctacgacggtttatacatacattgtatacgtattctgcgcgctggtgctttgtatctccacagcggccagcggcctttcctttactggttacggtgcggcctccgtggtggtgggattcctgctggccgtattttccacgcttctcggacacagtatcttcagctggtgtttaaaatttctgtctccatccttcgtctccgcttcaaagctgtgtgagccggtggtggcggccatgttcgccgcggttttatttgcagagataccggcgcttctggctgtggccggcggaatcgtgacaattagcggcgtgctgctttattcccgcgagcagcgggccatcacatcgtaaggtacagcagaaaaaacactgtgtgactttatcacagaaacgattttacttcccggttataattgcctcatgacaaaaaacgagaggtgaaccaggcgatgggaaataaaacagtaattatcggaggtgtagcgggcggagccacgacggcggcccgcttaagaaggcgtgatgaaaagcggcagattattctgctggagcgcggggagtatatctcctacgccaactgcggacttccttactatataggtgatgtgataaaaagcagagactcccttcttttacagaagccggaggtcatgaaggcccggtttgatatcgatgtgaggacttcgagtgaagtaaccgccatccatacagacagaaaatcagttacgatcaaggataaaaagacaggggagacctatgaggaatcatacgatgatcttgtcatagccacgggatcatccccgctgataccgcctgttccggggattgacggaccggacattcatactctgtggacgattcccgatacggatcggatcaaggaggtgctggtggaaaagaagccccggcgcgcggctgtcatcggaggtggatttatcggccttgagatggcggaaaatctggttcatgcaggcgtagaagtgacgctgatcgagatgcagaaccaggtaatggcgcctcttgacctggagatggcggagctgcttcatgaaaatctggctgcaaacggtgtcaggctggtcctgggagacggtgtgtcctcctttgaacgggtaaatggtcatacggtcatcagactggggagcggagaaactgtggaaacggatcttgtgcttttatccatcggcgtgcggcccaacagcagccttgcaaaagaggccgggatcaccttgaatcagcggggcggcattgtggtggattctcatttgagaacctcagcggaacacgtctatgcggttggcgacgtcattgaggtggagcattccgttctcggaaccaggacgatgatcccgttagcggggcctgccaacaaggaagcgaggatctgtgccgatattctggcgggagacgagaaggaatacaaagggaccatgggaacctcagttgccagagtctttgattatacggcggccctgaccggagtgaacgaaaagacgcttaaagccatggggaagaagaaaggaacggattacgagaccgtgctgatcagccagaaatcccatgcgggttactatccgggagccgtcacactgttccttaagctgatattcggaagaaagggcgagatctacggagcacagattgcaggtcaggaaggcgccgacaagagaattgataccatcgcttcggttatggggatgaaaggtaccatctatgatttggaggaattggagctggcctatgcaccgccgtattcctcggccaaggacccggtgaatatgctgggatttactgcggaaaatgtgttaaatcatctcgtctcctttatgagttctgatgaactggaccgtcttttagcttctgagcgggagggtgaccgtccgctggttctcgatgtcactgaggatgtggaacgcatggtttaccatattccgggttcgtaccatataccgctgggacagctgcggaaccgtttaggagaactggatcgtgagaggcagatcgtcgtatactgcgccattggagttcgttcctacaatgcggcgagaattctgtcgcagaatggatttaaagacgtgaaggtgctggaaggcggaacttccttctataaatccatgcatcaccgtgacttcgcggaacaagaacggagtgagccggagcagggaaagcatgtgaaggaaagggaagtgaaggaaggaacgcaggtgaaaggaacacagatggaaggaacgcagatacacacagccgccgcgaaatccgttaaaatcgttgactgctgcggacttcagtgcccggggccgatcatgaaggttcatgaagcgattggtgagatggaagacggggagattctggaggtttccgccacggatatgggattctcacgtgatatcgcctcctggtgcagacagacaggaaacacgctggtggatacgaaacgaaaagggcaggaaagcatcgtgctgatccgcaaggggctggagaaccgggaggcagagcaggatacggtttccactgttccccgcactctgaacggaaagaccatggtagtgtttgacggcgacatggataaggcgctggccgcctttatcatagccaacggtgcggttgcaatgggaagcccggtgaccatgttctttaccttctggggactcaatattttgagaaagcctgaaaaacgaaaggtggagaagtctctgattgaaaagatgttcggagccatgatgccgcgcggcgccggaaagctgaagctttcaaagatgaatatgggcggtatgggaactaagatgatgaagaaggtcatggcagacaaacatgtggattccctcgagatgctgatgaaccaggcaatgaaaaacggcgtaaagctggtggcgtgcaccatgtccatggatgtaatggggattcggaaggaagaaatcatcgacggcgtggagtttgccggtgtggcgacgtatttaggcgatgcggaaaactcaaatgtgaacctttttatataattataaggattggacaaaatcgtgtccatatcgaaaccagagatcccgtgaagcacgttctcagccttcacgggatctctggttttcataatttctctctgcttaagacaccacgttcctcataataagggatatccagttcttccagcttaacgacatcttcatgagccaccgcccgttttacttcctcttccaggcttatgtagtcgcctccctgtttcttgggaaacagcggcgggttattttcgtgatacttaaacggcttgaattcctcctgttccacaaactgcccgttttcgacgcagcctttcagtccatactgtgcctcaattgcagtcagccgggcttttagcttctctttgaccgcgagaacttcgggagtgggggcatgataaagaagattggtcgtttcatccggatcattttccagatcaaacagttcttctttaccgccgccatagtagtaattgtatttatagctcttcgttataaggcttatccagcgcagctttccgtggctgtgttccacatattccaccgtcctgtcctttcgcccatccactgcaaatatcgattcgcccggcaatctctcaggattcggacagggaactcccgccacgtccagaacagtaggaagaatatcattgatatctataaatctggtatcctcacttccggcttttaactggtccggatacctcataataaaaggaattcttacggaaccgtcatacggaagcatcttctggaaggttccgtgatcccccagcatttccccgtggtcgcttgtgaagagaatcagggtgttatcatattcccccatatccttcagctgctgaaggattgtaccgatattataatctacaaatgatatggatgcgtaatagagttctcttgctctccggagatatgactcattgggatagtctgcaatatattttttccattccgcgatcccggatatcggtgttttcgactcctttaacggaggaagctcttttcctttgtagagatccgcccatttttccggaacatcgaacggaggatgaggcgctataaagctgctccacaggaagaatggcctctttcccccattttctttcagatggtaaacacttctctttgccacccatgtgctgccgtgatgctcttccggaatcagggacctctgaggcaccatatataacagatggcgcactccatggggactctgcaaatgtccatatccgttctcttttaaatacttcgcgtattcatcatcctccaggtatcgcggaatttcttccatcagttccatttttgtaaatccgttatgccttctgcacggctgaaaatgcatctttcctatcgcaatcgtatcataacctgcgtcggacagtaactgcggaagcgtcgggagatcgaaagggatcgtctttggatcactttcaaaatagttgtcgtcaaatccgtgatacctggccgtcagaccggtaatgatctggtgcctggccgccatacagacgggattgctggaatatgcgttgggatagcagcagccttccgcggccagtctgtccaggttcggggtctccataaaatcatatcccatggcgcagatggtatcgtatctctgctgatccgtggtaatcagtaatatatttggttttttcatctgttggctccttttaaaattaaaactgtgcccgttcatctaaagcatgcctgatttccatgtttctctcgtctgtcagttcgtagaaatgcatcgaaagcagcgacgcaatatatcctaaaatcggaattccgaatcttaagacaacgatgataaacaatacggtctgtgtctgttcctgattcgcggcaaatccaaagataccaagcagatagctggccagaaacgcgcctatggcgccgcagaatttattcataaatgaaaacgtggatgacacaacaccgtttcctttgactccggtgacatactccgcataatccacacagtcgggaagcatggcccaggccagcgcactcggaaccgtggaaatgagtccaaacagggtgatcagcacgatcaatgcggcgctgggaaccactggtttcacaaacagtaccgccagcgggatgatggagaaaagacttccataccagtataatctcttttttccaaccttcttcgttaaaaatgggatcgccaggttggacagtacgcctgtcatggtcagtgccacggaagtgatgggaactaaatccactcttcccaggacgtatttaaaatagtacatgttgactgccagaagtgcagaatttgcaatcatatccgtaccaaaagccgacatcagcataagcagtggtttgtttttggttatcagctgtgtttctttcagcagatttacctttggcctttcgatttttaaatcgatggtatcatacggcttcagtccccacgcgacgcaccagaagcacagggtaatcagaacgcccaccagggctccgaaccgtccccagccggtggctccgccgccaaacacttcgactaacggcaatgcgaacgttgtaatgaaaaaacggccaacctgaatcatgatatttttccatgatacgaccatggttctctccgtggaatccttcgccagaaccggaaccagtgaggtaaacggaacccctactactgtaaaggccagtgagtacagtatgtagactgcataaataaataccactttcatggtggaagagagctccggcgcactgaacagcagatagaccagcactcccaaaataggcgctccatagattaagtatggccggtaccgcccctgcttcgttcttgtctgatccgcaataaagcccatgagcgggtctgtgacggcatcaatgatctttgtaacaagcatgagacctgccaccgtcaaagaactgataccgaaaatgtcggtacagaagaacgtgagatacaccaggatgaactgatttgtcatactgaatccgatgccgcctactgcgtactttccgaaattgaaataatccggctttccaattgttttactcttacccatttaaatatcctcctcttacctctcctcgtatgtgcttttcctgaatctcattttataggatttatccggacagttatgatgccatttggcacactgggaatatattgtgtatattgtgcaattctgtgaatgaattttgtgcaaaatcaccatatacggtaaagcaattccaacgctgcgttatgtctgattgcggtcacgcttttcgcaggaacgtgttataatgattatataattgatccgccaaaatgtatcctttctttttccggattgatacaaaaccattgacgaggagataagaagccatgaatcaaacgaccgaacatacgctgtttcaaattatgcagttcgtacaggagcagcacaggctggaacatccggtaaccagtgatatgatacgtccatacttaaaccgcatgcttgccatacgaatggtacttaaagacgattatataacaacggttcatacaccgatcaaaaaagtttactatgtcatgtcggggtcattctccatgataagaagctccgttgacggaaaaaacacaattcgtattcaaaaggcccccaccttcctgggcgtggacttcaccgtcctgtctctcgacggctactatgcggataatcttgcactggaggattgtctggtgcttgaaattaatcagaaatactttttagagagtatcaggcaaaatggggagatgtgctatgaggttttgtactcgatctgcaataaattttttcaaacgtcgttccgctatgaccatacgctcttttacgatccatgcacaaagctgatgatttatatcctggatcactggatcgccaatcacggacagaagacaaagtataccatagcggttcccaatacccgtatagccgatgagatcggcgtcagcatacggacgtattatcgtgcagtcagcaaattgaaaacggatcatttcatttctgttgtttccggtaatatctgcgttacatacgagcagattcaccatataaagtcttatcttcaaaattccaaagctgtcacagcgctgccggcctttctggaaaacagtacgctgatgtaattcctgtgcagcgagtacaaagaaggaggaattggaataaatagtaatagttactaatattgtgataaagtcacataccgggccgtaaataaatgctatactttccccatacaaggcagacagcaaagcctgaaaagaaaagggggttatacgaatgaagaaattcatatgcagtgtttgcggctacatctacgacgaagccgccggtattcccgactgggggatcgagtcggggaccaaatgggagggactgcctccggactgggtctgtccgttatgcggcgctccaaaatctgcctttcgtgaaaagaaggaggaaggggcaaaggctgtttctcaggaaccggcagggaaatccggcgaaggcggcggtgaggaactcagagaactttcctttggggaactgagcgcggtgtgttcgaatctggcaaaaggctgtgagaagcagtacctcgccgaggaaatggagctctttttacagctggccggctattttaaggcgaaggcagcaccggcagaccgggagaatacgggagaactgctggcaatggtttcaaaggatctggagacggaataccctcaggcggaatctgccgcagaggagagcggggaccgcggcgccaggcgggctctggtctggagcgggaaggttaccaggatgctggaagctctgctggagcgttatgaaaatgagcagggagcctttctggagcacacaaaggttttcgtctgtgatatctgcggattcatctatatcggcgacgaggccccggccatatgtcccgtgtgcaaggttcccagtttaaaaattatggaagttcaaaggaggtaaaaatatgcatgcagtaagaaatatcagattatgtacgaaagactgtctctgcctttatgtctgtcctaccggtgcaaccgatacggagaccggccaggtggatgcctccaaatgcatcggatgcggaatctgtgccaatgcctgtccatcaggagccatctccatggtgccggagaaatatccccctcagcagaagaaagaagagaagacaacagaacgcttaaataaactggctgccagtaaggtaaagcaggaagccatggccgcggccatcggccgtggaacggcagatccggtggtaaagcagtttgcggcagccctggagcggtccaaccgtctgatggcggaggatttataccgcgaggcgggatatatgcttcctcagagccggaatacccatgaactgcttatgtccatggcgtccgatgacgataaacttccggaggattttccgaaggaggcggccaggaggctgctggatctgctggaagtgaatgaaagaagatgaatacgaaataacgctgaagtaaagccggaatacaggggaaataaagggagtgacttgaccactgcagtgtgatacaatttagaacaacagtatggaatacttctatatacaaaggagagagtggaaatggctgatgtgacattggggaaaacaaagattacggtgaacaagaacggcttcggtgcgctgccggttcagagagtttcggtggaagaggcgggaacgctgttaaaaaaggcgtttaatcatggaatcacctttttcgatacggccagggcctacagtgacagtgaggaaaagctgggcctggcttttgaagggattcgtgagaagatttacattgccaccaagacggcggcagatacggcggagggattccggcgggatttagaggaaagtctgcgccttttaaagacggattacatcgatctttaccagttccacaatccggcggtctgtccgaagccgggagacgggagcggcctctatgaggcgatgctggaggcaagggagcgcggaacggtccgccacatcggcattaccaaccacaggctgcatgtggcagccgaggcggtcgagtcaggcctttatgagacgctgcagtttccgttttcctatctggcatctgaaaaagaactggagctggtggaagcctgcaaagcggcggacatgggatttatcgcaatgaaggctctgtcaggagggctcatcaccaattctgccgcggcctatgcctacctggctaagttcgacaacgtgcttcccatctggggaatccagcgcgaacatgaactcgaagaatttctgtcctacattgacaatcctccggtcatgacagaggaactggaggcagtcatcgaacacgacagaaaggagctgttgggagagttctgccggggctgcggatactgtatgccgtgtccggcggagattgagatcaacacctgcgcccggatgtcgcttttgatccgccgttccccatctgcgggtcatttgacggaagcgtcacagaatatgatgatgaaaattaaggattgcctgcactgcggccagtgcagcagcaaatgtccatatggtctggatacgccagccctcctggaacggaatttaaaggattacgaggagattctgggcggaaaggcttactaagacacaataaattcatttgatcttttccaggcgcggccttataatatgatacgttatcagagaatacgattttatgacaggagagattgattatgaagaaacgtatcatgctgctcatggttttgacagcggccgtgctggccggctgctctggtaaggcgggcgcggcagaccagacgacttcctcttccgccgcagagacggctgcagaggagacaaaaacagacgccggcactgcgggagagacggcggaagcagtgaaacatcatgtgaaaatcaatgtgaaggactacggcaccatctcagtggagctggatccgacatacgccccgattaccgtagagaattttctctcgctggcggaatccggcttctatgacggactcacatttcaccgcatcatcgacggctttatgattcagggcggagatccgtcaggaacaggactgggcggttccgataccaccattaagggcgaattttccagcaacggtgtggagaacccgctttcccatacgcgcggggcaatttccatggcccgttcccaggataaggacagcgcaagctctcagttctttattgtacatcaggacagccctcatctcgacggtgattatgcagtgttcggttatgtgacggacgggatggatgtggttgataaaatctgtgaggacacgaaagtgacagaccgcaacggaacagtggcaaaagaaaatcagccggtgatagagagcgttgaagtggtggactgacacgggtgaatctctgccggtgatatgtgattcgggattttggacgaaaagagcagtgaaaacaacagtgaaaacaacagtgaaaacaacaggggagccgttggaagcagaataacttcttctatcggtttccctgttgtttttcggatcaatgaccgcaaatcagagtgttttcccgcacagaaccgcgattctactgacagtcgattgccacagtttatcatattttgtacactgtacataccggaaggtgtttcagccacgcccggatacaacaggaaaagagggaacctatggataatgagaaattcgggcagttcgtgcggtccatgcggaaagaaaaacagatgacacagcagcagctggcggatcgtcttcatctgacggataaagcggtatccaaatgggagagggggctgagtcttcctgatatatcgatgctggagcagctggcaaaggagcttgatgtcagtgttgtggagcttctctgcggggagaagaaggaggacaggatcgggaaagaaactgtggaagagcttctggtggacactatgagtgattccctgaaaaaagaaaaaaaggagcgaaggcgctggttgattcttttgggcatggtcatatgtctggcagtcctgactgttttatatggaaaaaccgcgattaattttgcgctggaccgtttttctgagagcagtgagactgcgtaccataccagtgaatttcagattgttgtgaaacgggagcagaagcctgagggctgttttatctataaagaaccggccgggcagtttcagagcaactttcatgtgatggagattgcatacgatggaagcgtccgggagctgttcgcactggaggaaacgggaatggagttagaccgggccccgctgctgaacatggaagatgactgcctgtacgtcctgttcgacggcatggataacgaggaccggacggagcggatctaccggggggccattggggcggatccccagggatttctaccgaggctgttccggtacgattttcagtcgggtcaggcagaggaggtgcccctgcccgatgagaagcactcactcctcatcgatgcgttttcctgtcacgggcagacggcggctgtgactcagggctttaaaggactgctgttcggcctcaatctgggattttaccagggggaccggctctgtatatcgggaattgatgctgcagatgggaaaagagaagctgctgtacagtggagcaggtattttgaaaatatgacaaaggatggcggaatgaggacgagaggctgcctcgacggagactcctattatattgccgccccagacggaatccggaagctggacttagagtcgggaaccatggaactggtgaaaaccatggatttgctgcgctgcggccgtgcggagcttaagaagacagcactgccgggaggtcctgaatgggcggctgtattttccatggcggaaacggcagatgaatacgggtatccgcaggaatggaggacggtaattctggggttcgatgagaagtttgaaccggtgggaacgctggaactgccgctgtatgcctccggcgtggaatgggggataaccagcgttatgatttctgacggaggagatgagttccggagtgtgcttgcagaccttaagaccatgacagggcaggaggcggtccgggccgggcgcggggaactggtgagcagtctttatggaacttcctggcagcagagaagtcagtaccgcacggacgcgctggaggagagtaccatccagtgggtctatttagataactatggggaatactgtctgtcgggcacgaaaaagagaataaaagaggaataaagtattaagtaattcttacatttaaaaaaggggttgtacttttggctgatatggtgttaaggtatagggagagcggacgcgggagtctgcggaccaggcggcgctcaattcttaaaaggttttaaaggtaaggtgaatgagtatcagaatgaagaaaacaggaatgcttgtaagaattgccctgatggcggcagtattgatcttattgccggcacaggctgtactggcagatgacacgaccagatttgtaccgggaacaaaggtgaacggcatcggaatcggcggacttacggtggatgaagcgaaagcacagatagaaggcttttacagcgcagaatacaagctgacgataaaggagagagacggaaagaccgagacgttaaaggggggagatgtgggatataaggcagcggctccggatgggctttccagcatccttgacgcacagaatgcctcgggccgcgtgtcagggccttcgacggataattcccacaccatgagtatgagcgtgcagtacgatgagggagccctgaccaatgcagtgaacggattgggctgcatcagcggtgcggacattgtagtgactcaggatgcccatattacggcatatcaggagggaacccccttcacgatcatccccgaggtacagggaaacaacgtggatcaggataaggttctggctctcgtaaaggaagcggtgaaggcaggcagcagcgaagtggatctggcagcatccggctgttacgcgactgtccgagtaaccgcggaggatgcggcgttaaaggatctgtgcgataccatgaaccggtgcagggacatggtgattacctatcagtttggcgaccagacggtaacgctggaaggggaaaccatctgtacctggattctcggaagcactcaggacggacttgtagatgtgaattacgacaaggctgcggcatttgtgaaatccatggcggatcagtttgatacagccggaaagacaagggtgttccatacgacgacgggaaaagatttgaatctgacgggcccctacggctggcagattgaccaggcgggagagaccgcatcgctgatcgccatgatccggaccggacagagtcaggcaagggaacccttatacagcaaaaaaggccaggacaggaccgtggactggggaaatacttatgtggagattgatttgaccagtcagcacgtatatatgtatcaggacgggaatcttgcatgggatgcgccctgtgttacaggaaatgtatcaaagaattacacgacaccggagggcatctacagcctgacctataaacagacggaccggatactccgcggggagaagaaggcggacggcacatacgaatatgagagtcacgtggattactggatgccgtttaacggaggcatcggactccatgatgccagctggaggagtaaattcggcggaaccatttaccagtacggcggaagccatggctgtattaacctgccgccggcaaaggcaaagaccctctacgatatggtttacaccgggattccggttatctgctataattaaataagggaaaagatcagatcccggaagacattttgtgaaaaaacgtctttcgggatttttgtatagggcctgctgcggggcaccggacagggcgtgaacgttaccgggcgaaaaggaaacctgtcttgtcacctgtcttttgattgacaagacaggtgatttatggtaaatttaaacaaaagggcagtactgtttttggcgaaagtgtcagtgagttgcagcaggtacagccctttctgaacgtgaacgcaggaatgagaggaaaggagatgggaagatggaagaattcatgcctcatatcaggctgtcgaaggagcaggcggcgccccatgtgcttctgcccggggacccgcagcggctggaccggattgcggaatgcctggaggaggtgaaagaactggcttataacagggaataccggagcctaagaggcgtctataagggcgttccggtcatggcggtatccacgggaattggcggtgcctctgccgccatcgcggtggaagagctggtgagaatcggcgtcaggaacatgatacggatcggaagctgcggcgctttacaaaagggaatccggctgggggacttaatcctggtgaatggggccgtgcgggatgacggtgcctcagtcacttatgtggacagcatttatccggccataccggacacggagctgctggcggcatgcatgatgagtgcggaggagctgggagtaaagttccatgtgggaatcgccaggagccatgacagcttctacatcgatgacgaagaggcggtcagcacctactggagggagaggggcgttctgggctccgatatggagacggcggcgctgtttgtcatcgggagactgcggggagtgaagacggcctcgatcctgaacacggtcgtggaatgggaagattccctggaggagaacatcaacagctataccggcggagagtccgccatgatgcagggggaacggatggagattcttacagcgcttgaagcgtttgtacgaatagataaaaaacaaacagggaggcaattcgtatgagtaacatttttaaaaccaaattaaatgcagcatgtatcgtgctgattccggcatgtatcggaatcaattacttaggcaagttgtttgcgtcagtcttaaagctgccattgtggctggattccatcggaacctgcatcggcgctgtgctgggcgggcccatcatcggtggcatctgcggcgcggccaacaacttaatctacggctttacaacaggcgattccatcactctggtctatgcactgaccagtcttggcatcggtgtggctgtcggaattatggcaaggctcggacgtatggagaagttttcgggtgctgtcttgacggcgtgtgtggccggctttgtggcagtccttatttccacaccgctcaacatcatattctggggcggtacgacaggaaatctctggggagacgccgtgtttgcatggtcacaggcttccggacttccggtagcgctggggtccttcctggatgaagtaattgtcgatgtcccggataagctgattaccctgttcatcgtatttgccattatcaagggactgccgaagaagctgacctccctttacgagatgggcgatgaggtggagagtctcgattaaccacgaaactttttaatgaaggatggagcgttttatgaaaagtatcagcctttatgtggacaaagatacatatttgaccaggctgcatcccttcgccaagatgctttatattgcggcggccatcagtgtgcccgtcatcatgggcacactgtggatgttcggcgtgtttattgccgtcagcctgggactgctcatcagcggaaaaatcatgaaaaaggtctttccgctgattgcattttcgtttaccatcatcatcacggtcttcctgatccacggcctgttcaaccgggagaatcagaatgtcctggcggctttggggccgcttaagttctataaggaaggacttctctacgcctcccggatcgggcttaacatcttaaacatgcttctggctttcgccatgtttgtgctgactacgaagccggctgccctggtggaggacctggagcaggcaggcttttctccccgcttcgggtatatgatcagctccgtgttccagatcattccgcagatgatggggacgatgaacaccatcatggatgcacagcggagcagagggatggagacggaaggaagcctttttgtgagggcgaaggcatttatcccgctgatttcaccggtggtgagcagctcccttatcaataccagggagagggccatcgcgctggaagtgcggggctttgattcaaagacgaagaagacctttttaaatgaccacaagatcaaggggcgcgacagggcgtttatgattgtgatggtccttctgatagcgggcgctgtggtatggagggtgatgagatggctctgatagaagtgacgaatttgaagtaccgttatccccatacggaaaagctggcgttagatggcctccattttcaggtggaaaagggaagctttatcgggatagccggtgaaaataaggccggtaagagcacactctgccaggctctcgtcggtctggtgcctacgatgtttaagggggcctacggcggaaagatcatgatcgacggactggaggcgggcaaaacgccggtggcgatgctctgccagaaggtgggactgatctttcagaatccatttaaccagctttccggtgcgaaggacacggtgtttggggagattgcttttggtctgcagaatctgggggtgccgcgggaggagatcgtgcggcgggtggaagagaatttacggcttctcgacatcgaacagtaccgagaccggaatccctttgatttatcggggggccagacgcagagagtggccatagccagtattcttgccatgcagccggagattatcgtgctcgatgaaccgacttcccagctggatccccagggaagcgaggaggtgttccgggtagtggaaacgctttccaaaaccggaatcaccattattatggtggagcacaagatggaaaaactggcgtcctactgtgacaagattctccttcttcacgacgggaagcagattgcatacgatacgccggagaagatattttccagagatgatctggaagaactgggggtggaagcacctgtgtttacccgggtctgccggaagctttccgtatacagggaggaggatggaaaacgcctctatccggtgacgatggagcagaccatggctttaaaagatcagttcccgccggaattaggcggaaaatataaagaagcggagcagccgggcggtgaaacagaaagaaccaccggcgcctccgaccgtacgctaagggaaatattccgtatcaaagatctgtcgttccactatctggagcatgtgccgattatggaagacctcaccctgacgctggataccagacctgctgcggtaatcggtcagaacggagccgggaagacgacgctggtcaagctgttaaagggactgcttaagccggtttccgggacgattctgtttggcgggaatgatatttcagagcggacggtggcacagctggccggcagtgtgggatatgtattccagaatccggatgaccagatcttcaaaaatcgcgtgatggacgaagttatggtcggtcctctcaatatcggcatgggccgggaggaggcggagaggagggccagagaggccctttccatggtggggctcctcgatgcggcggaagaaaatccctatgatctggatttatcagagcggaagatggtggcaatcgcctctgtcgtcgccatggacacacaggtcctgattctggacgaaccgaccattgcacaggatgccagaggacgccgggtgatcggatcgattgtacggaaactcagcgattccggtaagtttgtgctggcgattctccatgatatggattttgtggcagagtactttgaacgggtcattgtgatggcgcatggaaaggtgctggccgacggaccgaaggaaaccgtattttatgaggaggacgccctggcggccgcaaagctggaacagccccatacggcggctctctgccggaaactggggtatgagggggcgtttatgacggtgaatgacataaaagacaggacagtataacaggagtgatggaacgagtggacggagagaagagaagacagcagatcatggagattctgaatcaggagacggcgcctgtatcagggacggaactggcaaagcgggcaggggtcagccgtcaggttgtggttcaggacattgcgctcttaagggccgagaataaagagatcatgtccacaaacaaggggtatgttctctataaaccgcagccgggaaggccgaaggctcacgtccgtgtgttccgggtgaatcacgacacggagcacatgctggatgagcttcagacgattgtggattatggaggaagaattctcgatgtatccattgaacatacgctctatggccagatcagtgtggacctgatcatcaataaccgtctggatgcgcaggaatttgtgaatcagatggctatgagccgggatgagccgctgaaggctctgaccggcggctgccattaccatacggtagctgcagagtcggaaaaaaacctggatatgatagagatggagcttcagcgaaagggatatctggcttagagccggatatccctttctgcggatcggatgatgtgttcgctctattcactgcagaatacaacgattttctccggtgtggtcatggccggaatactgcgtgtggtggtgctgtagagcaccagcaggtagtggttcgcgggggtgccgtagtagatctggccgttggccatgactacttccgtaccacccttttccatcaggtttaatttcagcgttgcgtcggtattcaccaggttttcgtcgaagtaatcgaaggcggcaaagaggccgtcatccgcctctgccataagcactgcgtgatagcggggcggatagattaaaggagcaggtaccgaattgtcatagaatgcgacaatgggatctcccggtttcagggtttcctggccttccacataggtgagaggggtgacagtaaaggttacaggtcccatatcctgcgtcataatgaaaaacagtagtgtgcagtcctgagtaccgtctgctgtctgcaggggagtgatggaggtgatggttccataaacgggtgtgaactgtgccatgtgatgttccttatgtgtacactttctttttatcatatgaggaagaatggcaatctgtgaaaaggaaggaaatatgaaacagataaggttacaaaaaagattggtaaatagctaaaaattttaaaatataactaaagttttgtcagatatcgtttaaattacaatggacaggttgtggcaggtttagtataatggaggtgtcgcgtaaatattttcagtcttttcaggagatgcgcgcacagctgtatacggaggagaggagaatcagacatggaaaacagcaaatttgcagtcatcagtgacagttcctgtgatttaccggaagaactggctgcagcgaaggaaatcacggtggtgccgttctatgtttcttttgatggagagacctataaaaaggagggaacggagatcggcatccgcgagttttacagggaaatggtagagcagcccggtgtatatcccaagtcctccatgccgtcgattcaagattatgtcgatgtatttcagccatttgcgcaggcgcatactcctgttctgtgtatctgcatcacgacgaaattcagcggttccatgcagtccgcgctgaatgcgagagagatggtgctgagccagtatgaggatgcgcagattgaagtgatagacgcaaccgtgaacactgtgcttcaggggcttttcgtgctggaggctgtctccatgagggaggaagggatgaccctctcggaggctgtggcggcacttgatgagatgaaagagagcggccggatattctttacgattggaagcatggattacttacagcatggcggaagaatcggaaaagtggccggagctgcggcttccgtgctgggaatcaggcccattattaccctgaagcagggagagatatttccgagcggaatatcgaggagcagaagaaaatcgattgataaggtgattgcgcttctgctcgattatctgaaggaaaacggggagcccatgagcagctaccgttttaccattggctttggctatgaccgtgaagaggcggttttatttaagaaccaggtgcttgcagctctcagaaccggggggtatgagatggaggatgcctggatcaaccagattggtgcgacgatcgccgttcatacggggccgtatccgctgggagtcggaattatcagacgtcatcataaagaaaggcagggagaatgagttatcttgcagcaggcgtgattgcttttggtatgtatttactctatgatctgaacagctttacctggaaaaaccgcattctgcacacctttttcctgatcggcagcgtgattctggcggtttctaccgcggtatgtttcatgacgctggtgaaggcgtacggaccgccggtctggcgaattgtgatatttggtgccctggctgtgagtcaggctgcgctgcttgtctatacactgtttttcgcattgccgtttgaaaaaacgtataccaggctggaagaaaacccgccagtgtacacagagggcgtttattccctctgcagacacccgggggtggtgtggtttttctttctgtatctgtttctcgccctgttaaccgggcagaggctgatgatggctgtgtgtatctgttacagtgggctcaatgttttatatgtctggtttcaggaccgggttacatttcggaggacgctttccggttatgaggcgtatcagagagaaacaccatttctgatacccaacggaaagagcatacgtaaatgtgccgggtacttccggacagtggaggaggacggggatgaaatttgaagataaactgaaggagcgaaaggattgggagctctggaaggaatactgcggttttctggatttaaccatagaagaatttatggcgattcagaaccggcttatgctggaacagatcagtaaatggaaggccagcggtatcggaaaggcgatcttaaagggacggaatccggagacgattgaagagtttcggaagatggtgccgctgacctcttatgaggattatgcggacagcttatccttaaaggataaatccatactcccggatgatccggtgatctggatccagacgacgtgggagggcggacggcatgcgatcaagctggctccttacacgagaagcatgctggagacgtaccagaataacatgcttggctgcctgatgctgtccaccagcagcgggcgtggagacttcgatgtcaacccaaaggatactattctttatgcgttggcaccgcttccctatgcgacgggaatttttcctctgcttttaaacgatgcgatcagtatcgaatttcttccgccggtcaaggaagcccagaagatgtcctttagtgaacggaataaaaagggctttaaaatgggcttaaagaaggggattgacttcttctttggcgtcggaagcgttacatattacgtcagtctcagtattgcgtctctcggttccgggcataaaagcggaggcggttcgggaagcggcgacggcaaaaagaagatttccatcagcccggccatggtgatccggctgctgaaggcgaagcatatctgcaggaaagagggaagagatctgcttccaaaggatttgttccggctgaagggatttatgtgtgccggaacggataaccgcctttaccgcgacgacttagagaagctgtggggcgttcgccccatggagatttttgcggggacggagccaacctgtatcggaaccgagatctggagccgggatggcatgtactttttcccggatgcctgtttttatgaatttatcccggaaaaggagatggaacggagcctggcggattcctcctatgaaccgcgcacctgccttatgaacgaggtggaggagggggagaaatacgaacttgtgatatctgttctgaagggtggcgtcttcatgcgttaccgcgtaggggatgtctatcgatgcatcgccctggaaaatgagcgggatcacgttcgatttcccagatttgagtacatagaccggataccaacggtgatcgatatcgccggatttacaagaatcacggagaattccatcagccgcgtcatcggactgtcggaactgaaggtgaaggaatggacggcagccaaggaggtcacggagaataagcggccgtttctgcacatgtatgtggagatggagccggagtgcctgttttcttctgcagtaaccgtcaacatcctgaaggaacacatgggcgtctatttcaaatacgtcgatgaagattacaaggacttaaagaaaatcctggggattgatcccctggagattacgatcctgcggtgcggaacatttgacgcgtattaccgcgggggtaaggagaagatgcggcggatcaatcccacccagtatgagatcggagagcttttaaagagtcaggaactggtttccgcttttggaaggaggcctcagagaagtgtataattactcatttatctctgtcacggctctgttttgctacatgatcttatttgtggcgttcatggccgcgcagaagacgaaaatcatccactcattcctggtagtgctggccgcgtttttactgtggaccggcggttcccttgccatgcggatggagctgtggccgggagtggaattctggttccatttctccattgtgggcctgattattctgcccttcacattttttaactttatttatgctctggtggattcggatgatactatcctctggtgggcgtggctgatactggcagtggtcaataatgcagccaatatcaaatggggcttttacattccctgcccggaagtggtaagactggctaacggatcggccggctttgtgtaccatatcggatggcccatcgccattctgtttattaccatgtcgttccccattatccatatgttctatctggtacacaagtcgtacagaaagaatacggtggaacgaaaccagctgaagccgatttttgcaggaatcgtaattctgtttatcggacatgccggaacgttagtgcctgcattccacggattcccgacagatgtgctttcaggcattattaatgcgggattcatgttctatgcgttatacaaaaaacatttattccggctgaccctccttgtttcacggggagtggtctatggaatcagtacgctgttggtggcattgctgtttgccaattacatcaatccgctccaggagtttatccagaggaaaatgcctgtatttgcagacagcagtcttctgattgtggcagtctgttttacacttgtcacgtttctgctgtcctcagtggtgaagacgtttatcgatattctgtttactaagggggaactggttcagacggaaaatttaaagaaattcagcacagcggtctcgaaaagccttgaagtaggtgatatcgtggaagagatctcctcggtgatccaggatacgctggcagtagaatccatctatatctgtctggctgaccaggcgggagaaagctttgagacggctcacaggtcccggccgatcagcggtgtgaatgttaccataaggaaagataatcccatggtggagtggatgcgccagaacagacggtgtatccagatctcggaattccgcaggaccgtgctctttaagtccatgtgggaggaggagaagcggctgatccgggaactggggattcagtgtatgctgccgctgcaggacgaggaaaacctggcggggatcgtgcttctggccacgaaaaagaaggggaagtcctatggatatgacgatttgaattttctggagtcagtcagttccatcgcttccatcgcggtccgcaattccagactttatgagaaggcctgtattgaggcaagaacggatgaactgaccggactgctgaaccgaaagtatttctatgagctgttaaatcagcagtatgagaagaaaccgaaccgggagctggctctgattatcatcaacatcgatgattttaagctgtataaccagctttacggcatgaaggagggggacacggccctgcagaatgtggcgaagatcatcagtgccacggtgggagaacggggatttgtggcccgctacagcggaaaggaatttgcggctgcgctgcctgatttcgatgttctggcggccagaaacatcgcagaatccatccggatgcagattttaaatatgaataagagagccacggattatgccttaaaggtgctgaccgtgagctgcgggatctgtaccatcccgtattccgccagcaatatcaagcagctggtggagaatgcggacatggccgtattctccgtgaaacggaaagggaaaaacggcgtgatggtctttgacatcggatcccatatcgacggaagtacaagagacggagagccgcttgtcagagaggatgtgtacacttcgtaccagtccaccatctatgctctgacggcggcgatcgatgccaaggatcactacaccttcagccattccagacatgtggcggagtacgcggggattctggcggaagagtacggcatgagtgaggatttcattgagctggtgagagaggccgggctcctccacgatattggaaagattgggattccggaacatattctgaacaaaccggggaagctggaaccggaggagtatgagatcatgaaggggcatgtggaagcggcggtcagcattatcaggaacctgccgtctctagactacgttatcccggccgtgatcggccatcatgagagatatgacggtaagggatatccgaggggaattgcaggggaggacattccgctttctgcaagaattctctgtattgcggattcctttgatgccatggtttccaaacggtcctataaggatcgctgttccctggagtttgccatggaagagattttaaaacaggccggaatgcagtttgacccgcagctggcgccgctgtttgtggaggcggttagggaggggaaaattaaaccggagaaggaatagaaggtggcttcgcgctcagaaagtttcttccccgcctcggggtgcgtcccggagcagggggagtggatatcccgtgtccgccttgcttcctactcgccataaaaatgaacgtgactgacggacacataatgcgtgtgttcgccagtcacgttcatttttatgcctcgtatccagatggcggcacactgggatatccactccccctgctccgggacgcaccccgaggcggggaagaaactttctgagcgcgaagctttgaatttagaaaaagcgaaaaacgggggaggattgggtgggggggaagggggactgagatataaactttgatcgtaataaaaatgtcataaaatcttatcagaaaagagttggacatcaatcatggcagtgcgttataataaacgtattgattaattactagtgaagaggtaggaattggatggagagagaaaaactacgcagcagaaagaagaagtcgctgggcataaagggttgggccgctgttttaggtgggatcgcagtggcgggggccgcggcggttactgtgatgtacatacagacggggaaacagtatcgcactgtgttttttccgaatacgacaattaatggggttgatgcgtcgaagaagactgtggatgaagtgaagcagctgattgcttctggcatcgatggatatacgctgaccataaaggagaggggcggagcggaggaagtgatatcgggcgatgatataggcctggaatctgtctttgacggcagcctcgagaagcttctggaggaacaggagcctaatgactggtttagtcacagaaagacgcctcagtcttttgaaatcgatacgatgatccagtttaatgaggagaagcttggggaagtgatcggtgcgcttaagtgttttgatgaggcacaggtggtgaaaccacaggatgcggccatgtcggagtatgtgtccggacagggatacagtgtgattccggctgtggaggggaatgaactggataaggagaaggtggcggccggtgctcaagaagcggttagcgggctacagagagagctgtctctggaggagctggatgcatatgtgaagccgggaatcgccagtgatgatgcggaacttcttgcccgtgtgcaggcactgaacagatttgtgaatgtcagggtgacttatacttttggagacagccgggaagtgctgagcggtgatacgattaaggactgggtcggcattggtgatgatgggaatgcctatgtcagcagcagtgcagttacggagtatgtgaagagtctggcttctaaatatgacacttataataaggcaaaaaccctgaatacttcgtacggaaagacggtcaggattacgggaggcagctatggctggaggatcgaccaggccgcagaggcagatgaactggcggctattatccgttccggcgagagccagacgagagaaccggtctataagcagaaggcggtcagccatggagcgaatgactatggcagcacctatgtggagattaacctgacggcgcagcacctgttctattataaagacggcagtcttgtggtggaatctgattttgtgtcgggcaatgaagccaaaggctgggctactccggcgggagtctatccgctgacgtataagcagaaggacgcggttttaaagggcgaagattataagacgccggtggattactggatgccgtttaacggcggaatcggtctgcacgatgcaacatggcgttccagctttggaggtacgctgtataaaaacggcggatcccacggctgtgttaatctgccacattccgtagcgcagaagatttttgagaatatctcggcgggtactccggtactctgttaccatctggagggaacggagtcgaagactacttcaacaccggcgggaaagccgatacagccgacgactgcggcgccggagacaacggcagcgacaactcctgcggctcccactacggcagcgacgacggcctctcctgagagcacggcaccgtctgaggctcctgtgccgaagccaacggagagccagactgcagctccgacgaaggctccggagacggaagcctcgacggcggcttcttcagagagcggagagaaggggcctggaattccaacggggagttcggggaataaagagattggaccgggggtctcatgacggtgggaccgggaaaagattagttttaagaaaagaggaatcggcatatgctgattcctctcatggtttctgctgaattttggagcctgcgccggattgagggttattcccactcaatcgtagccgtaggcttcggactcaaatcgtagcacacacggtttacattcttcacttcttttaaaatacggtctgtaatctttaacagcacggagtaatcgatctgctcgatagaggcgctcatggcgtctatggtgttgaccgcgcggaggatgaccggataatcgaagcatctggcgttatcgcggacaccgacggatttgaaatctggtacgatggtgaagtactgccatacagtcttgtccaggccggctttggcaaattcttcacgcaggatggcgtcggactcacggactgcttccagacgttctctggtgatggcgccgagacagcgcacgcccagacccgggcccgggaacggctgacggtataccatctctgccggaagtcccagttctacgccgcaggcacggacctcgtccttgaacagctgacgcagaggctctaccagctggaactgtaaatcttccggaaggccgcctacattatgatgggatttgaccatcttggcagtctttgttccgctttctacaatgtcgggatagatcgttccctgtgccaggaattcgattccctccagttttctggcttcttcttcaaatacacggataaattccgcaccgataatttttctcttctgctccggatcggcaacccctgcaagcttgccaaggaaacgctcagttgcgtccacgtatactaaattggcatcgagctgatgcttgaatacgtcgatgactgattcagattctcccttgcgcatcaggccgtgattgacatggacacaggtgagctgtttgccgatggccttaatcaaaagggcggctacgacggaactgtccacaccgccggagagggcgagcagaaccttcttatcgcctacctggctgcggatcagatctacctggtcggcaatgaaattcgtcatgttccagttggcctgcgcatggcaggtgtcaaatacaaattcccttatcagagagactcttgtgtcctcgtcctcaggccattctgctgcgcggttttcgcaggatgccggctcgtgtccggcggccatgacgggatagcctgcttcgtagatttccggcagaacatcgattcgtacgccgtccacgatatggttgggacctccgtttatgatcacgccctttacgttgggaagctttttgagctcttccgcggtaatgtcatggggataaatttcgctgtaaacgccgactgcacggatttcccgggccagtcttgtattttctgtacttcccaagtccagaatgactatcatatcctgtttcataagtgcctcctttgaccttctcttctgtgattctaatgtaaagctgtaattattttgctgtaatatctagtgtagcagaaaatgaatcgaaggtaaatgaaattttcatgattttaacagactttcagtagacaaatgcagaaattagacgtatagtatatgagaaattgttgcgattgcaacagttgaaactgcaagtgaagagatggaggcagacatgtttcgaagattctacggttatatgaaggattaccggaaatacgggcttttcagctgtgcgtgcgtggctttggaggttatgttcgaactggtgattccgctggttatggcggatattatcgatgtgggcgtggcaaacggagacaggagttacattatcacgaagggaatcgagatgtgcatactggcgcttatggcgctggggcttggagctgcatattccagattcgcggcgctgtgcggccaggggctgggagcggagctcaggaaggcggagtatcagaagatccagagcttttctttttccaatacagatcattttaccacttcctccctcgttacgaggcttaccagcgatgtgacggtgattcagaacgctgtgaccactggcctcagacccgtcgtgcgtgctcccgtgatgatggtgacagcgctctgcctttcattttccatcaatgccaggctggcactgattttcctggtggcggctccgcttctcgggattatcctgtttatcatcatcagccatgtgaggccgctgtattccaggatgcagaggagcgttgatctggtaaaccggattgtacaggagaatttaactgcggtccgggcggtcaaggcgtatgtccgggaaggctatgagatggaaaaatttgatgcggtcaactcggaactgcagacggtgtcggagagagcgttcggcctggcctgtatgaacatgcccgccatgcagtacgtgatgtatgccaccatcgtgtctattctgtggtttggcggcagcttgatttttaccggaggaatgcaggtgggagagctcaccggcttcttaagctatgtccttcaggttctcaactctctgatgatgatttccaatgtgtttatgatggtgacccgttccatggcctcgggaaaacgtattctggaagtcctggatgaggagattgagattaaggatgagagcagtgaaccgttggtcgtggagaagggcggaatcaccttcgaccatgtatcatttaaatataagaagaatgcaaaggaatacgtcctgtccgatgtcagtctcgacataaagccgggacagacggtgggaattatcggcggtaccggctcggcgaagacgacgctggtccagctgattccaagactttatgaagccacggagggggaggtgcgcatcgacggaaaaccggtgaaatcgtatccgctggagcacctgcgcgatgcggtagccgttgttcttcagaaaaacacgctgttttccggaacgatcgaagataatctgcgatggggaaaagaggatgcctcgagggaggaaatggagtgggcgtgtaaaatcgccggggcggctgaattcgtggagcgtttcccggatgggtacgatacgtatctcgatcagggcggggtgaacttatcgggcggccagaagcagcggctctgcatcgcaagggctgtcttaaagcggcccaggattttgattctcgatgattctaccagcgccgtggatacggccactgagacaggaatccgaagagggttaagggagagccttccggatatgacgaagatcatcattgcccagcggatcacctctgtgcaggaagcagatcagatcattattatggaagacggaaaggttcatgcggcaggcactcacaagagcctgctggcctctgatcctatctaccaggaaatctattcttcccagcatttcctgccagacggcagtaagggagaacttccgcagaagggagtgagcttataatggcaaaatatattggctataagaaaccgaagaatacaaaaaagacgctgctgcggctcatttcctatatggggagacataaattttccatgtttgccgtgggaattctggtgattgtcagcagccttgccagtgtatttggaacgtatatgctgaagccggtcattaacaattacatcattccgaaggatattccgggactcgtaaaggcattggtttttatgggggtgatgtatgcggtgggagcaacggccacgctggggtataaccggctgatggtgaaaacgtcgcagaatattgtaaaggaaatacgaaaagatctctttaatcatacgcagacgcttccactggcgtatttcgactcccatacccatggggagttgatgagtcattttacgaacgatgtggatacgatcgcggaggcactgaacaacagctttacactgctgatccagagctttatcacaactgttggcacgatggtgatgattgtgattctgagtttccggctgtcacttatcgtactgggctgtatggcgcttatgtttctgtttatccggttcaatagtaaacggagccggaaatatttcatggaacagcagaagtatttgggggagatcaatggtttcattgaggagatggtgggcggacagaaggtggaaaaggtctttaaccacgagaagaaggattatgaggaattttgcaggaaaaatgagcgtcttcgccaggcgtcgaccaacgcaatggcctattccggcttaatggtgcctgtcgtcgtcagtatttcctattttaattatgcggtttccgcctgtgtgggcggactgtttgcactggccggccttatggacatcggaagtctggcttcctatctggtctacgtccgtcagagtgccatgccgatcaatcaatgcacccagcaggtcaatttcattctggcggctctgtccggtgcggagcgcatctttgaaatgatggatgaggagccggaggtggatgagggcaccgtaactctgtgccgggtggaggaaaagccggatggaactctgggcgaatgcagccggaagagcggactgtgggcgtggaaaatcacggatgaggagagaggaaaaagtactctcgttccgttaacgggtgatgttcgttttgaacatgtggtattcggctacaatgagaagaaaaagattctcgacgacatcagcctctttgcaaagccgggacagaagattgcatttgtaggatccacgggtgccgggaagacgaccatcatcaacctgatcaaccggttctatgagattcagggcggggtgatcacctatgacggaatcgacatcacaaagatcaggaaggcagacttgcggcgttcactgggatttgtccttcaggatacccacttgtttaccggtaccatcgcggagaacatacggtacggaaatctggaagcttcagaggaggacgtgattcgtgctgcaaagattgccaacgcgcattcctttatccggcgtcttccagagggatacgagaccgtattggaaagtgacggtgcgaatctgtcccagggacagaggcagcttttggcaatcgcacgggccgcagtggcatccccgccggttctggtgctggatgaggcgaccagctccatcgatacgaggacggagcgtctgatcgaaaacggcatggatgcgttgatggaggggcgtacggtgttcgtcatcgcccaccgtctttccacggtgcgcaattctaaggccatcatggtcctggagcacggaaggatcatggagcgtggcagccacgaggaactgctggagcaaaaagggcggtattaccggctctatacggggcagtttgaattggagtgaaaaacacttgaaatctgttaaaaaaaagggcataataagtgacgttggatcgttagagataagaaaggcggtatcaaaagaatggaccgaaaacaggaggtcagagacttaatgttccgtactgagatggccagaaagaggcggatccacccggtatggaccgatatggggctgattgcagggcagcccagggtattaagccagctgttcatcaaagatcatataacacagaaagagcttgcagaggcatgctgtatcgaaccggccacgctgtcgcgtgcgctggaccgtctggaagccatgggatatattatcagaaacgacaatcctcagtgccgccgttccttcttaatctctctgacggaagagggaaaaaagatggcggtaaaggtgaaggatacatttgaggggctggaagaagagatgatggacggtttttcagatgaggagatggatacagtcatcagccttgtttccaggatctatgaaaacctgagaaaggcagacggaaaagatccggccggtgatcaggaataagccgggagaagcggacacgggactccgggcaggaaataaagtgtagagaaaagggaggtatttaacgcatggaagcagtaaaaaaagagtcatttgtgccgatggcatttttcaagaaagaagcctatacaggcagctttaagggaatgcgctaccgcgtgataaaatccgaagaccagtttgaagcagttgtctatccggaaccgtattgcttcgaggcgaccccggatgagaacaaggtaaagaataccttcccctttaccgaagaaggcagagaatctgtcgtaaactggctgaacgaccaatacgactcccgaaaagcagaatgggactccgccgcccgttaataactcagaaaaacagactggcatcatatgatctcgcttattcccattacaatgccagtacacagccccagtgattggagagagggcgcgggtggccggggaggaggaacgtacagcttcttgtttcctcggtggcaggaactaaagggggaaggaaactgtacgttcctcctccccggccacccgcgccctctctccaatcactggggcgtacctcctcacaaaattctcattccccctttcctatttctcccaaatatgatatgataccatattattgggactatttatatggaggaaacaggatggaagaaaacagagaagtattagaaactgcggaaaaagaggaggttgtttctaaaaactttatcgagcaggagatagataaggatctggcagaaggggtttattcccacgtgcagaccagattcccgccggaacccaacggatatttacacattggacatgctaagtccattttgttaaactacggactggctaagaagtacggcggacagtttaaccttcgttttgatgatacgaatccgacaaaagagaagacggaatttgtagagtccattatagaggatgtaaagtggctgggcgccgattttgaggacaggctgttttttgcgtccaattactttgagcagatgtatgagtgcgcggtctttttaatcaagaagggcaaagcatttgtctgtgatttatccgcggaggagatccgcgagtaccgcggcgattttaagactcccggaaaagagagtccgtaccggaaccggagcatcgaagagaacttaaggcttttcgaggagatgaaggaaggaaagtatcaggacggagaaaaagtgctccgcgccaagatcgatatggcctccccgaatatcaacatgcgcgatccggttatttaccgtgtggcccgcatgagccatcacaataccggagacaagtggtgcatctatccgatgtatgactttgcccatccgattgaggatgctgtggagcatatcacgcattcaatctgtacgctggagttcgaggatcacaggccgctgtatgactgggtggtgagagaatgtgaatttgagaacccgccgcgtcagatcgagttcgccaagctgtacttaacgaacgtggtaaccggaaagcgttatatcaagaagctggtggaagacggaattgtggacggctgggatgacccgcgtctcgtatccatcgcggcgctgagaagaagaggctatacgccggaagccatccgcatgtttgtggatctggtaggtgtgtccaaggcgaacagctccgtggattacgccatgctggagtactgtatccgcgaggacttaaagttaaagaagccgagaatgatggctgttttagatccggtgaagctggtgattgacaactatccggaagatacgattgaatatttagacgctcctaataatttggagaatccggagctgggagagagaaagcttccctttggaaaggaactctatatcgagcgggaagattttatggaagaaccggttaagaagtatttccgtctcttcccgggcaatgaggtccgcctgatgaatgcctatttcgtgacctgtaccggatgcgagaaggatgagaacggcaatgtaactgtggttcactgtacgtacgacccggagacgaagagcggttccggatttacggccagaaaggtaaagggaaccatccattgggtagccgctaagactgcggtatccgtagaatgccgcctttatgagaacattgtggatgaggagaagggcaagttaaatgaggatggaagcctgaatttaaatccgaattcccttaccattatcaagaattgctatgtggaaccggcgcttgccgaggcgaagccgtatgacagctaccagtttgtgagaaatggctttttctgcgccgactgtaaggacagcacgccggagcatctggtatttaaccggatcgtgtccttaaagagctcctttaagattacgaaatagaagtttcgcccgaagctgcggaattatgcggcagagaagcgaataagatagaacagaatgtttgaaaagacgatactgaattgataaacaggcaatgaaagatgccgcgggggatatgttgttgacctggccggaccgtactgcggtgacgggccggaaggactgatcccgcggcactttttatacatgcaggcggcagacactgtgatacaccgtggagctgcggcggcaacgtgcgtttacacttcagtcttaaggaggtggagcagtggaacttatgatccctctggacagtcattcagggatgccttattatgaacagatttacgaatatatcagagaagagattaagaagggaaatttaaagtcccccacccgtcttccgtcgacccgtctgctcgcggagcatttgaaggtcagcaggagcacgacgcagatggcgtacgaacagctgctgtcggaaggatatattgaatcggtgccgtgtaaaggatactttgtgtcgcgtatcgaggaactggtggacacggggcaggagaacgggggagaaagcccgttttttggaatgtatccgtgggaagtgccgggagacagtcagccggcagcagccggagagggggaatatcgggtggatttttcgccgcgcggcgttgatctggacagttttccctttaatacgtggagaaagatcacgaagattacgctggtggacgacaacaaggagatgtttgccacaggggatccacagggggaacccgcatttcgtgaggcgatccggggatacctccattcagccagaggtgtgaactgcacagcggagcagattgtagtcggcgcaggaacagaatacttactgatgctgctttcccgtattctggggccggatcataccatagccatggaaaatcccacctacaaacaggcgtaccgcgtcttcgagagtctgggatacccggtggtgcctgtggagatggacggctccggtctggagacttccctgcttgagggaagcggggcggatatcgcctatgtgatgccgtcccatcagtatccgacaggaattgtgatgccggtcaaaaggcggcaggaactgctttcctgggcctataaaaaagagggacgctatctgatcgaggatgactatgacagtgagttccggtataaaggaaaaccaatccctgcgcttcagggaatggatggaagggaacgggttatctacagcggaacattttcaaaatccatagcgccggcgatccgggtaagctacctggtgcttccgaagccgcttctggcggtctataaggagcgggtgaatttttatacatctacggtgtccaggatcgatcagaatatcctgtaccagtttatggtgagcggctgctatgagcgccatttaaaccggatgcgggccgtgtataaggcaaaacacgacgcgctgatcggagctttaaagccgtttgaacatcaatttgcagtaaaaggagagtatgcgggcctccatctgcttctgaccgataagaagaacagaacggagaagtggctggtggagtctgcgaaacgtgcgggggtaaaggtttacggtctgtcttcctatttgatccgggaggggaaggcggtggtggcgcctactgtaatcctggggtatgcgatgctcagtgaagatgcgattaaagagggaatccggctgcttcgtgcggcctggtcatcggatggagaacaggaggagtaatagtgaagattccgttaagggctgccggagcagccgctgtaattgtggttttactgcttgttgtaggtattcttggaaacgttcggatatcgggatatttaagggccagcatggaggaatccattcatcaggtcgagagtgagattgccagtaaagaggtgcaggaatccatcgaggagtcaaaaatagaagagaccgcggtacatgagattgcgcttacttatacggaagaacagcttttgaatctgctggaggaaaaactgcgcgccaatgacttagagggagcagcgagagtgctgaacgagaatgagtctgcatttcaggatttgttttttggaaaactggcggatgagatttgtctgtatgatggaagtgtgatgaaggacgaggcggatggcttcggcctcgtgttccagcgtgcgggaactgtcttctacggtacgtttaaagacggaaagccgtcggggcagtgtgtggcccttcaggcgattacgctggatgagggagtccgttacgattactccgacggaacatgggtggatggcgtcatggaaggccccggagagtgcggttatgattattatgagggtgtaaccggggacggggcaaaaaaaacggtgaagaaagggaccttttcaaacgatctgatggagggggagatcacctatacctcttcccgccagacaccggagagagggactttccctgatgacagcgggagcggagaatcgactacctggactatgacggtggaaaaaggagtgattgttccggatgcaaggtggatttccgatacgtccgacgacggaactcccgtctttcggctgatggctgatacggatgatggccacgcctatgtggtggaggccgatgccatgaaggaagcgcgctggaagaacatgattgagtggggagagtaacggaagagcagccggagatgaggcgttgagaattggcagagaagagggggcggtgcagtgaatcaggaaatgctggagcggctcagtgtgattacggaagaagagcgggagattttaaacggtcgcacggagattgacaggacacggtacacaaagggagacgaactcgttacatcccgccaaatggaagtgagaggtgcttttcatattgacagcgggaagatgctggagcacggaaaactgatccgcatccgaccgcacacccggtttgttcattttccaaaacataaacacaattatatcgaagtgatctatatgtgcaaaggggaaaccacccatgtgattgacggggagactgtcgttctccgtaccggcgagctgctctttttaaatcagcacgccacccaggagattctgcctgccggtgagggcgatgttgccgtgaacttcattatattgccggaatttttcgatactgcctttgagatgatgggggaggaagaaaatctgctgcgggattttctggtgggatgcttgtgcaacgacacccggtatgccagttttctgcattttaaggtggcggatgtgcttccggtgcagaatctggtggaaaatatggtatggacgctgctcaacgaccagcccaacaagcggagcatcaatcagattaccatggggctcctgttccttcagctgatgcactataccgataagatcagtcacacctcggagggcttcgatcagaggctgatttttcaggtgctgggatatatcgacgagaattaccgggatggtgaactgaccgagctgtcctcgatgctgggatacgacatctactggctgagccggatggtaaagcggctgacaggaagaacgtataaggaacttctccagatcaaacggctgaatcaggccgcgtttcttcttttaaatacgcggctggcagtggcggatgtggcgctggcagtgggatacgacaacacgagttatttttaccggatctttaaggagcggtatcagatgacgccgaaggagtaccggaagaataaccgggcgctgtagcgaaaaggcggatcgttggaaaaccaggtaccaggacctggaggcagttttttatcaataaagctaaatgacatctctctgagcctccagtttaccggtctgccagaacaggaagataacaagcaggatccctgccggaatggcggctatgagggaaaggctttttaacatgtcgtatactatctgtccaaggatcagtgccgcgatcagtgtaagggccgtaccatgaccgttctgtcttcggcgggaaaacagcgtcaaaaaaagatacagcagcggaaggaaaacagcgaactgcaggaacgcgcgggggatgctgccattcatctccattctaaaataggagtggttggcgtccgcaaatttttgcatcaggatggtaccggcctgaccattcaaaaaggagacagccatcaaaacggcgactgcggtcagccgagagaagatacgcagccacggattgggctcagccaggcgccagagctcattctggcgggcatccggtttttccggcatgcagttcattccgtaaaagagcgccataagcagggaggcggcataacagacacttatgaacacgacggcgaatcctgccatgttatcgatgatttggcaggcggaaagcggaagaagcaataacactgcattcaggaccaggaaaaatgccgccgctgtccgaatctcatgaaataccgcctgaatctgccattttatggctttccatactctaatcatggcatatctcctccagataatactgttctacggatttatggtgcttcgttctgatttcttctgtctccatctgccagactcgtccgtcagcgagaaatatgacctcgtcaaacagggactccaaatctttcaaaaggtgagtcgccataacgatggaactgttgtctgccatattttccagaagaaagcgtttcatatcctttttaaaatagggatcaattccgtcgaagggttcgtcgaaaagatagaggcggctgtatctgcacagtccaagaatcatgcagagccgttcctgctttcccctggaaagacggcagagccgcgtcctgcggtcgatcctcgactgctccagaagcatcagggcgtgttcccggtcaaagtcggagtaaaaatcctcatagaatcttacacagtcgtctgcgttcatccagtcgtaaaagtggcttcctgaaagaatataggagatggccgcctctccgtggataatccggccttcgtccggcttcagcagcccggccatcagttttaaaagcgtggactttccaattccgttgtcgcctatgactccaatgatccggttttcgcggacctcggcagtaacgtggtttaagaccttccagccatttcgcgttttggtgacattctgcagcttcagcagaacggtatctgctgtcatctgttccattctcatttcagacctccttccagttcctgtgaaactgcggctttgatctgggcatctgtcagcccgcagtgatgcatccggactataaagtcctgaatgattcctgttaccatgtcttccgaaagtctttcctgtatctcggttcggacaaagctgccgatgccttttctggtctcaatgattccctccgactccagatactggacggtccggtgaatcgtaagcggggagacctcgaaaaagaccgcgtattccctcacggaaggcagcttctctccgggacgtatggttccgtttatgatttgctcttttatgaaggttccgatctggatatagatcggctggtcattctgaaaatccatggagaggcctcctgttatactgttatatatatgtataacagtataacgaaaaatgccgggattgtcaagtggagagaaacagacagggagtcaggaaacgaggaaaagcaccgataaaagctgccgcaaagcataaatcatgcccggccttatcatgattttcacatgaacggaccgggcataagaagatttctcatatctggcataacatcctgcagacgattttttatctacagactcagatccttccctccatttaccctgttgaagatcaagagtgaaatgaccgtcaggacagtcagtatggtggacagcgccgccgctatgccgtagttgcctcgtacgacctccgtgtaaacggcgaccgtcagggtctttgtcctgcctgtatacaggatgatggcagttgacagttcgctgatcatggtaacccagcttaagattgcgccggagacgattccggccgtcatcatgggtacggtgactttgaaaaatgacttcatttttgaggctccgagggagatggccgcttcctcgatactcatggggatctgctgcaggatggccaccgaggagcggatggtgtagggcagacgccggattacgagggcaaccaccatgatcagcatggttccgcttaacataacaggctttttgttaaagccggtaagcagtgcgataccgagaacggtgcctggcacgatataggggatcatggagatgatatccaccgtactggtgagcgcgttctttctgcggaccaccaggtaggcgatcatgatcgccagaagtacaataatgacgagggcgcagagagggattatgatggtgttctgaatgctgcgtcccagctttccaaacgcggaggcataactttccagagagtacccggaaacgaaaatctttccttccgtcttcttaaaggacgtatagctgacgtatacctggggcagtattgcgattcccacgatgaggtaggaggcggcgtgagccagaaatccggtaagacccttcggcgtcttctcctcaatgggatgcagggcatttaaggaaaatgcatttttattggatacgtatttctgcgccaggaagaccacggtcgtgacgacgatggcgatcaccgcaatcgcagcagcaaatccgtcgttgcctcccacctcgttgatgaattccgtatagaggacgaccgggaacgtacggtagccttcgccgattaacatgggggttccgaagtctgcgaaggaacgcatgaataccagaagggccgcggccagaagcgtcggcatgatcaacggaattacaaccttgaaaaagcattttaatccggaacagcccaggttgttagccgcctccaccagtgaattatcgatgtttttgagagcacccttcgcgtacagaaataccagcgggaacagctgcagcgtcatgacaagtacgatgccgccgaagccgtagatatccggtatgttgattccaatattcctgaaaaatgtagtaattacgccgcttctgcctaacagaaggatccaggagtaggcaccgataaacggagcggacatggatgccacgatgattaatatgttcagcagggattttcctttaatcttataaacggaaaagatataggccagaggggttccgattgcgatagacagcaccgttgccgcgatggagaccttaaagctgttgaacagggtattaaaatagtaacttttagaaaaaaacttggtaaagttggccatggagaactggcctgtctcaccgtctatgacggactgctggattaagtgggccataggataaatcagaaacagggcatagactgcaattgtacacagcgtgatgattccccatatgtccagccggaatttgctattatccttcatatgcctcactccttacaagatttaagctgccttctttgttaaagacattgatcttatgcttcttcacctgaagaagtaccctctgacccggcttcagctcatcttcgatggaagattcctccacaatttccacgactccgtgtccgtcatccgtctccacaaagtagtgggtatttaaaccgagatacgtatattcctttacgacaccggcgattccttccgttccctccggcgagatgacgaattcctccggacgtacggaacataggacctcctgccttcccgcctgtttcaaacactccagttccacccggtacccgctgctgaaaatgatggcgccgttttctacacgggcggggatgatgttggttctgccgataaaggtggctacaaagacattctttggtctctggtaaatatccttgggagtgccgacgtgctgaatgacgccgtccttcatgactgcgatggtatcgctgatggccatcgcctcttcctgatcatgggtaacgtagacggtggtgatccccacatccttctgggtgtggcggatcacgcttctcatctccagacggagcttggcgtccagattcgataacggttcatccatcagcagaacatccggcgtgatgactaacgccctggccagcgcaacacgctgctgctggccgccggagagctggttgggcatacgctccgcgtactgcattatctgcatcagatttaagtatttatctgtctcagtcttaatcttttctttttcgatcttcctgtttttcaacccaaaagcaacgttgtcacgtaccgtcatgttggggaatatggcatagttctgaaaaaccatgccgatattccgcctgctggggtccatatcattgatgcgggtgtcgttgaaatagatatcgccgccctcaatggaattgaatcccgcgatcatacgaagaagtgtggtcttgccgcagcccgaaggcccaaggagggtaaagagttccccgtccctgatggtagcatttaagtccgggatgactgtgttatttccatacttcttaactgcgtccttaatcattatcttactcatctttatcctccggccctctcattctctttatttggctgattcaatgcttgtgaagatatcggtatacttgtttaccagttcttttttatgagaacttacgtatggaatatcttcttcaattacgtagatgtcagacattggcgtcatgaaatcactggtttttgcgtcttttaataccggacggttggtcagggtcgttccccagatattctgaacttcctcgctgatgatgaagtcgatgaacagctttgcattatccatgtttttggcaccctttacgatggttgcggaagccggaagataaacgctgccttccttcggatagatgatcttcacgggagcgccgtcttttacaagctgtgcacagggatcctcgtaggaaaggcctaccagatactcgccgtcagcgactcccttgtaaacgcctgaagagctctcgatgatcttgccgtcgatgttggtaaataaatcttctacatatttccatgccgcgtcatcttcatatccgcccatagccagcagaatgttggtcagctgcgcaaaggcggaagaggagttggccggatcggccgtagcgattttgccttttaattccggattcagcagatcggcatagccttcgatcttgatatcgccgattaaatcggtgttaacgattaagcagctgccgtcgaggacgttgccggtgatgaaaccgcaggtgttcttataggcatccagcacaccggcgtcgttgggagatacgtatggttcccagaggtcttcattgtcaaaggccagagaccaggaaccgccgaagagtacgtcggcatacggatcatttttctcagactggattcgtttgaccagttctccggtgccggcctggatcacttccacgtcaacgccgtatttttcttcaaacagcgggatcgtcgcgttcatcagtccttcagagttgggagagtaaaccactaactttccgccgccctttttttcctcagacccggttgcctgggtatcccctgacgcctcgctgccggcttccgtcttcggtgccgctgttgttgccggtacggaagaggaagaagaacagccggccagagcggctgccgtcatggtgagtgccattgtcactgcaattgtttttttcatagtaaatcctcctttgattgatgttgataccactatcttagtaaaaatgcataaaagataatacctgaatttccgaacaaacagcaaaaataccgaacacatctggcgatttgtccggtattttactttctttatagaatttttgaacggtattccctgggggagcatcccatatattttttgaagacatagctgaaatacttgtagtccccaattccgcatttccacccgatatcggaaatggcgttgtcctcatctgccagcatggccagcgccttctggattcgataccggtttaaatactcgatcacggtagtacccaaagctttctggaaccgctggtttaaatagcgttccgagtaatgcagctcttcctccagatcagccagcgcgatcttctggtcgtaatttccggcgataaaatccagaatccgggcggcaaccgggtccataccgctcatggcgtccgtctccggaatcaaaacggaatgcttcagtttttcccggtcctccatttcccggcgcagaattctgatgtttttaagctctaaagcggcccgttccagagcctccttcatttcctccatatcaaggggcttgagtacgtagtaggaaacgccgtttcggatggcttccctggcatactcaaaatctgagtagccggtcaggatgatggcgacgtaatcataggtgtctttcgttctggcgatcatctggagcccatcctccaccggcatgttgatgtcggtgatgacgatgtccgggtttcgttccgcaatcagagcgccgccttcttccccgtttcgagcctctccgacgacactgcagttaaattcctcccacggtacggagttcctgattcctcttcggatgatgtcctcatcctcaaccaatattacactgtacaagttgtcctctccttattttttaatttgatatctacccggaaatactcaccttcccggctgtctatggtcatctcactgttatccccgtattccagaacaatgcgccgggccaggttctgcagaccgttgtgctcggttttcaattcctccgaccgcagcatggcgcgcagcgtctccagcgtcgcccggggaacgcccgggccgttgtcctccacacttaaatagaggtaatccccctcacatcggccgcatatggtgacgcggatttccatccttttcttaaaaccgtatttgatgctgttctcgatgagaggctgcaaaagaagcttcggaacgtcgtatctcatacattcgccggcaatggcggtctcacagaggaaacggtcgccgaaccgggttttctggatatagagataatcttcgatatacctcatatcctcctgcagtaatacatcctgcttcgtgttattgatgctgtagcgcagaatgtgagtgaatttttctatgaggtgcgcggctttgtctggctctgacatgatcaggtatttgatggtgtccagcgtattatagataaagtgcgggttgatctgcgtctgcaagttgctgatctcgatcatgctgtttaaacggatcaaatcggtgttgcgcgtgttcagttcgttgatgctctttaccatacggttgatctgactggcaatctcctcgaattcgtctccggtatgaatctcaatgatatggctgctgtcaccatggcgtataattctcatctcatcggccagtatgccgaccgaccgcgcatttttctccgccatgagtttggacagcttttgagtcatgataaaccagatgactcccagaaagacgatggtcagaataccgatggccaggtaaagtacatttttcggataatagatgaaggaatagatcgtaacgccttcatcctttaaaaagtgggacgaaagcagataccggtttccatggaggaagaccaggcgctgctgttcttcattccggaatttattggtattccgttccgggagaaacccctcgcgggagcagaaaataatatccccgtttgccgtagtgatgatgctgtcgtactggtaattggaaaacagcctggcccagtcatggccgtttaaatacgcgcctgcgaaccctatgagctggccgtcacggtaaagcggcctggaaaagacgtattccgaggtatctccggtaaaatagtacactgtgtgatagaggcccggcccgtttttcacggtattgtcgcagacgattccgttaaatgcgatccggtgcaggttcatgtcatcgtttccgtagctggtatagacgatattatggttgctgtccgtaagaattaggtttaagcgtatcggactgtcgacgttgtacttgcttaaggagtagcgcacctcgctcccgtctgtccggttctcaatgcaccgtgtaaaaatggagtcgttttccgcatcattcaaatacgtatccgtggcatggtaggctgtttgaaaggtgctggtaagaaattcaatatgttcctgaacattaaatctcgtgtttaagtaattgatgccgaatattgctgccgaaaaaaagatgcatccgataaaaaccaggaaaacgatattcctggttgccgctttttccagctgcttttgaaatatggtctgttcccgtgtctgtttatatgccatggcggtctcccatcaaaaggcctgcggagtttaatccgcagacagatatctctatatgcagtatagcacaagactgcaaataaggacatattttttaataaaccgagacctttttttctgtccggcaattcgataaaatatgattagaaaatatcggagggtgatacaaatggagaactattacctcgcagtggatatcggcgcctccagcggacgccatatcctcggtacagtgaaggacggaatcatcagtctggaagagatctaccgttttgaaaacggtatgaagaaaaagaacggccatctctgctgggatgtggaatccctgtttcatgaaattaagatggggatgaagcagtgcgcagtgctgggaaagattccatgcagcatgggaattgacacatgggcggtggattttgtcctgttggacggagaaggccggattctgggagacgcggtcggctaccgggatgacagaacgaagggaatggatgaaaaggtatatgaaaccatttctccggaagccctgtatgagagaacaggaattcagaagcagattttcaataccatctatcagctgatggcggtgaaggaggagagaccggaagagcttgccggcgcagagtccatgctgatgattccggattactttcattatctgctgaccggagtgaagaaacaggaatataccaatgcgacgacgacccagctggtcagtccggtgacgaaaacatggaattatgagctgattgcgcgtttgggatatcctgagaaactgtttacagagctgtccatgccgggaaccgtggtgggaacgctgtcgaaagaggtggaggacgaggttggctttacctgcgaggtggtgcttccggcaactcatgacacaggatcggcggtaatggccgtaccggtaccggagaatgcctccggaaacagcagtgatgcggacggcggcctgttatacataagctccggtacctggtctctgatgggaacggaattaacagaggcagactgttctgcagaaagccgaacggccaatctgaccaatgaaggcggttatgagtatcgtttccgttatttaaagaacatcatggggctgtggatgatccagtccgtgaaaaaggaactggcggcagccggagagacgtattcctttgcagagctttgccgcatggcttctgaggaaaccatacaatctattgtgccctgcaacgacgacgtatttcttgcgccggagagtatgacggaagcgataaaagagtatttaagaaaatccggtcaggaagtaccagagacggccggcgcgctggccgcagtcatctacaacagcctggctcagtgctataaggagaccgtggaggaactggaagccatcacaggcagaacgtatcaggccgtgaacattgtgggcggcggttccaatgcagactacttaaaccggctgactgcaggggctacaggaaaaaccgtatatgcgggtcctggcgaggcaaccgctgtcgggaaccttctggcacagatgattcaggccggtgaatttaagggacttcaggaagcaagagcggcagtttaccgctcgtttgagatcagtacctattaaaatagcggaggattgaaggatgatacataaatcgtttaaaatgcatctgtatgaaggcatggcagaagagtacgagagacggcacaacctgctctggccggagatgaaggatatgattcatgagtacggcggccataattactctatctttctggacagcgagacgaatgtgctttacggctacatcgagattgaagatgaagataaatgggcggaatcagccgacacggccatcaaccgcaaatggtgggattatatggccgatatcatggacaccaacccggacaacagcccggtgagcgtggatctaaagccggtattccacctggactgaccagagaggatgcggccggcagcgggctgacaggaaaatcagaataactgggaaatcagaataactggaagatgataatagaaaagcaggaaaaaggagaataacaccatgacagtaaaagaaagatacgaagccgcaaaagaaatctaccgggcagccggtgtggatacggacgcagcgctggaggcgctgaagaatattcccgtttccatgcactgctggcagggagatgacgtaatcggatttgacggcgcgggcgccctttccggcggaatccaggcgacaggaaactatccggggcgtgcaagaacgccggaggaactgatgtcagatatggacaaggcgcttagcctgattccgggaacgcacagaatcaaccttcatgccagctacgccgtgttcgaagatggcgagtgggcggacagagacaagctggagccgaagcattttgcaaagtgggtggaatttgctaaggaaaggggtctcggcatcgattttaatccgaccttattctctcatgtaaaagctgagaatgccacgttatccagtgaggttcccgagatccgcagattctggatcgaccatgtaaaggcctgtatccgtatttccgagtatttcgcacaggaactgggaactccgtgtaccatgaacatctggattcctgacggcttcaaggatattcctgcggaccgcacggctccgagagcgagactgaaggattccctggatcagatcctttccatcgattacgacaagtctaaggtatatgtggcggttgaatccaaggtgttcgggatcggtatggaaagctgtaccgtaggttcccatgaattctatatgaattacgcttccaagaatgatattttatgcctgctggacagcggtcattaccatccgacagaggtggtatccgacaagatttcttccatgcttctgttctttgacaaggtggctcttcatgtgacgagaccggtgcgctgggacagcgaccacgtagtattgtttgacgacgagacgagagagatcgccaaggaaatcgtccgcggcggcgcagaccgcgtcttactggccctcgatttcttcgatgccagcatcaaccgcatcagcgcctgggtagtgggcatgcgcaatatgcagaaagcgctgttaaacgcactgcttcttccgaacggtaagatggcggagcttcagaatgaaagaaagttcacggagctgatgatgctttccgaggagatgaagacctatccgttaggcgacgtgtgggattacttctgtgagcagaacggtgctcctgttaaagaggcgtggtttgaggaagtaaagagatatgaggccgacgttctggcgaagagaagctaagtacggcagtggttatggaatagaagataactgggataaaaagaataagaacagaaagaacaagaacagaaagaacaggtgtatataaaatgagagtaacagacgcagaatttgtaaaaggttttatccgtctctgtgacgacggcttcaagcagaactggcatgaaagaaacggcggcaacttaagctaccgcatcaaaccggaagaagtggaatccgtaaaagaagaattgacagacagcaatccgtggcagccgatcggaaccagcgttccaaagctggcaggcgagtacttcatggtgacaggaagcggaaagtatttccgcaatgtgattcttgatccggcggccaacagctgcatcatcgaggtagacgaagcgggagagaactaccgcatctgctggggccttgtaaatggcggacgccccaccagcgaactcccctcccatttaatgaaccatgaagtgaagaaagaagtgacaggcggaaagcaccgcgtgatctaccatgcgcatccgaccaacgtcatcgccctgaccttcgttcttccgctggaagataaggtgtttacaagagagttatgggaaatggctactgagtgtccggtcgtatttccggatggcgtgggcgtggtcggctggatggttccgggcggacgcgatatcgccgtggctaccagtgagctgatgaagaaatacgacgttgccgtatgggctcaccacggcctgtttgcctccggcgaagactttgatctgaccttcggcctgatgcataccgtggagaaatctgcggaaatcctggtaaaggttctgtcgatccgcccggataagctgcagaccattacaccgcagaattttaaggatctggcgaaagattttaaggttacgcttccggaggagtttctgtacgaaaagtaagcggcctgattgccatggagaggtcatgggaggcgcccggttccagtctgcgtacatgatttttgtgaatcagctcatctccttctccggtgcgggccccggagccgttccagggctcgatacagagaaatggcgcctggtccggatacgtggtccaaaaggcgatggtttcaaagtccggataggaaacctcgactccgcatccgtcagcccggtgaatgagggcgactctgcgggaggcgattttaggaaaatagagagcgttgtcccggaagagtgccctggacagaggaatggtacggccgcggagttcatatccgcggccgttggagaggtattctccctggaaacggtcaaacggcatggcataaacgtcttcttctttctcaaatataagacagtaatcctcgaagacagcgtcttcctccatgggacagcgaaagccaggatgggctccgatgcagtagtacagggcagaggagtctatgttggcaacccggtatttcaaaaaaaggcttccggcattcagttcataggtcagtgacagccggaaggaccagggatacatggcctttgtgagtgcgttgtcctggagtaaaaacgatgcacgttcctccgactgttccagcctttgaaactccatgtccttgcagaagccgtgctttggaagtctgtagctgcttccgtcgatcaggagccggttattcctgcagtcgcctaccacgggaaagaggagcggagagcatcggctccagaagcgcggatcgcgctgccagatgtattcttttctgctgcggtcttttaaagagatcagctgtgcccctgcactgtcaatcaccgcagttaattctgaatttctaattgtagtcaacataaaatttctccctttcagcagaattcatttaccccgtacatcggccggagactttggccttccgaagcagatttgcgctgcagcaaaataccggatacggatactataccatcctttttgcttgccggaaacaggaatatcaggtatgatagtagacagtaaaggaggcttgtcatatgcttcgcatcgaaaattccggaaaatctcagatgaaatccagaaacagggttcgtgtatttcgtgaaatattaaataatgaaggcatttccagaaaacagctggagaagcgtctgggcctttctgcaccgtctgttacgcgggttgtagaggaactgctgcgggaagggctgatatgtgaggaagggacagaacagacccatatggggcgcagaccagttatgctttgtgtaaaaaagaatgcctattacagcattggaatgaatttaagcaggtcgagactgtattactgtataaagaacctggggggagaaccagtccattccggagagatcaggcttcaggggagaaagaggggagatcagctgctaagtctgatggaatctgcggtcgaagactgtttgaaaacagcaggcgttgagaaaagacacctttttgccatcggtattgcttcccgcggaacggtaaatgaaggcaaaggaagcgtgatctatacacccgattccggtgaagagattctggttaaggaatacatgaaagaacggtatgactgccagattctcgtggaaaataatgtgattgccgatttaaagggacagtatctggacttaagcggcacgaaccggaacctggtgtatctctacatttctgacggagtcggaggcagcattatctgtaatggccaggtgatcgacggggagaacagcatggcagggaaattcgcccatattcttgtggagagcgggggaagactgtgtgcctgcggaaaacgggggcatttggaatcgtatgtgtctaagccggcgatggaagaagcatatttcgaggccagtgggaaaagactggaactgccggagatatgcagactggcaaatgccggggagacggccgctgcagcagtcctgacggatgccattgacaagctggcgattggcattaaccagatttttctggttgtgaatccgggaacgcttgtcttatatggggatctgtttgaatgcgtcgacgggattgtggagtatttaaagcagagaacaaaagaactggcatttacggaggagattgcggataactgctggctggtgagggaaaagaaaaatgtccgtattgaagaaagcattgccaggctgtctgtggaacaggctctcgagattattgtctaaacctcataaaaaatatataatttcatattgaaaaaatatagagatgtgatataatgataaaaagacaacggggtgtgtcttaaaaatttaactaattaatttcattatgaaattatatgagaaggagaggcagcaaatgaaaagaagaaaattgatggcattggtacttgcaggagctatggcggcggttgtgggatgcagcagccagagcggaacggtgaagcagccggagacgcagaaggaggcggccagccaggagagcacgaaagagaatggaaatgagggaaatacggccggtgacagcactgccgcacaggcaggcagctggaaaccggatcatgacatcacaatccgtgtgcccaatgcagcaggcgggacgatggatacgatcacgagaattctgggacaggggatccagcaaagcacagggactacggttatgattaataatctgaccggagcatccggagctatcgcggccaatgatcttctggcaaaagatgcggacccctgcgaactgatgacatcaggaattgcgctgtttacactggcgcctctgttcaaccaggatattaaagtcagtctggacgacttcaccatcgtgtcaggtatggtatctgaggattttgtactctgcgtaaacccggagaagagcggtatccataactgggaagaactgaaggcttatggagagaaggaacgtattctgttcggatccaatacgccaggaggaaccactcatatgctgggaaccgcactgttcggagaagccggtttaaacgcggaagccgtgacctcggatggaacgaataaggacatgctggctctgacctccggtgacgtaatctgtgccattggcaatgccagcgcctgtcagcagtttatcgaagagggaacagcggttcccattgccgtattttccgcagaagcctatgatggattcgaaggctttaccgttccgtcagtcgtggatctgggctatgatattcagtttaagtcctgtaatttcctgattgcaaaaaagggagcggatcaggctgctctggatcagattcacgatatgattctggcctatactgagacggaggaatgtaagaaactggctgaaagtgcgaaatacgtgccggatattgctgacggagcgagtgtacgtgccattgttgaggaatccgcaaacatgtgccgggaaatctatgaaaagtattatcactaaacctgtggggagaaaccgatatgaaagtgaagtacaggacaaatctgtgtgccggaatcataagcgtaatcttcggcctggcagttctctggctgattccggctcagattggtacagaatattcgtcaggacgcggtctgacctccagggctgttccaggcggagcggccatgctgtttatcgtgtgcggagcggcactggtctttcagagcctgattctaaagaaggacacggtccgggaactggatctggcgaaagaaggaaaggcgctcctctacatggcggtgttcgccatctatgtaatactgtttgattacagctttattgtggcttccatttttcttggaaccgtgactctgctttttacaaagagcaaaagaaagctgtattatgtaattgtaatgatcacggttatcgttttgtatctgttgtttacgcaggtacttcacgtaagattgaagtaggaggccgcaaatgaaggaaattatagttcaggcactgccccagctgttcactctggagaattttgtgtttgtaaacctggggatttttatcggaatcatcttcggatcgataccagggctgaatggcaatctggccattacggttctgattccgttcacttttaaactgggcagtataccggctttgctgatgctgaccgccatcttctttggctcgaattttggaggctccataacggccatccttattaatacgccgggcacgaatgcagcagcggccactttgctggatggctatcccctgtccaaaaaagggaaaacgagaaaggctctggacatggcgctggcagcttcaacctttggcggcctggtgagtgctctgtgtcttctgttttttgcaccgcagatcagtaaaatcgctatttattttggggcgccggagtattttgcactggcggtattcgggctgtccgtgatagcctctgtcagcggaagcagtattttaaagggagtaatcagcggagcgtttggcgttctgattgccacggtagggatcgatgctgtcagcggagtcacacgttttaccttcggcagcctgcagatgtataacggaatcaaaatgctggcagttttactgggggtatacgcaatcgcccagatgatcagccgcgtaaacggcacggaggaagaggattccggtacggagctgaaaaaggcggatccctcggatcgactgaccttcaaagagataaagagtacgatcccaacgatgctgaagtcatccgcgatcggggcgttcatcggagccataccgggtaccggcggggcaatcgcttcctatattgcttataatgaagctaaacgctgcgcaaaaccgggcgagaagttcggggaaggagagttaaagggaatcgccgctccggagtctgccaacaatggggctacggcggctacgctgattcctctgcttacactgggaatcccgggcgatgcggtggcagccacactgctgggtgcattcaccatgcatggactggtggttgggcctaagctgttttcttcttccgggcctgtcgtctatgcaattttaattggctgtgtgatttcacagattgtgatgtttttacaggggaagtatctgcttccggttttcgttaaaatcacacatattccccaggaacttctgacggcccttctggttgttatctgctgtacaggagcgttctccctggcgaattcctcttttgacgtgcgggttatgctgatattcggcgggatcgcttattttatgcagaaggtagaactgcctcccgtaccgatcattctggggatcgtccttggccctatcgcagaggccaatttaagaaattcccttgtcctttcaggcggctcctggaccatattctttaaacgtccgatctgcctggcattcatcattctgacctttgttcttatctggcttttaaagaagaatgataaaaagcagcgaaaaatggaagcggaatttttcgaaaaatatggagaaaatacggagaggtaaggaaaagaaccctatgcattataaaaaattatggacggatttacacagcaatattcatcacaatcagatgggagaactggaccagtggatcgagcacgccaaaaataccgttgatttctggccggtcgcttactatcccttctatatgaaggctaccaaaacgggagctggtctggaggatctatatgacggaaaattaattgaagaagactgggagcagctgcgcgaggcagtaaaacgggaaaatgcagccggttatcccatgtttatgggctatgagtggcagggctccggaaaggatggggaccataatgtgttctttttggataatgagcaggcaatgcaccatcccatgagatatgaggagctttatcaggcatataaggatacggaggcgattgccattccccatcatgtggcctaccagctgggcagtagaggaaaaaactgggagactcaccgggaggagttctctccatttgcggagatctactccagccatgggtgcagtgagaatgataccggcccctttgatatggagcgccatctccatatgggcccgcgaaccggagagacgtgttacgagaggggactggagaaagggtatctggtcggcgcgattgcctcaggagacaaccacaatgtaccggctgttcatgaccatggaaccatgtgcgtgctggcagcagacagaaccaaggaagcgatctgggagggactgaaaaaccgccgggtatatggtgtcagcagaagccgcatggatattgactttacgatcaacggtagtcccatgggggctgtggtgaagccgggagagggcacacttgcatttactgttcgggcggcagatgccattgaccgggtagagatattgaaggataacgttctcgataccatggcggttcatgcgggaacatgggaaaaggcggaatataccggcgttgtaaaggtgaaatttgcagtggagttcgggtgggggccaaatccaaagttttataaagaccggcttgtcaagacatgggatgggtctctggaggtgcccggccgtctctgttcggtacagaaatgctttaacagcttcggacaggagctgttaaacatgacggaaaaatcctgtgaattccatatgactacttatatgagcacgactacgggccactggatggggccgagtacagtcgtaaaggaaggctttgtgtttgaggttgagggaaatacagaggacgagattgtgctgaaggtggacagctacgtataccgcctgaagattggagaattgatgaaatcctcgagaattcttgcccagtaccgggagagtatggagctggcggcagaagtctttggaaatgtagagcactaccgtgatgatttttactggcataacgcctataaaaccagaatccgccaggcggtgccggaagaggcgtataccatgagctgcgaaaagaaggttgcactggaggcgggaagctgttaccggctccgggtacatctgagaaatggagatacagcctgggtttccccgatttttgtgagacaataacaaaaaaagagttccagggaatgagtggcttcctgtttcgctgacagggagcaccgttcattctccggaactctttcttaaattaccggctggttatggttcgtcaaccgtatcctccacaatcgtcgtggattcctctgcggcaaacttctttaatgcatcaccggttccttcgtatatttcttcaacttcatctgagtcttcttctttatcttcggtatctgcggcctgctccggttcctctttgaaactgtctgcagcgccggctgcgtaatcgagcccgccgtcttcggtgatatcttcttcctcgtcatcctctgaacggtccatggctgtatcaagcatatccttggctgtatcggcaactgcggaagcggcttccctggccgtactgttcacaatgttagctgcgtctttcacgaggttcttcgcggcagaggctgcatccttggcggcgtcagccatatcggcggccgcaaccttaaattcatctttgtcagcgtgaagggatacgtagttcctgttcattgtgctgtcaatcttggaaatgtcgtcattcccgtcatcttcaaaatcatgaaaatcttcttccagctctttatggaaagatttatatttcgtaaaataagagataccggccgcaacggcacccgcgatggtggcaaaagccactaatttcccaaaaccattacccttttttgccatgtgaaacactcctttcatttgattcttattgtaatacttataaagaaaaaaataaaggtatataataagaaaatttctataaactatgtaggaatgggaaaatgctctcagttatggaatgaaattgtaaaaaatatataaaattagcactcaactattgacagtgctaataatgagtgatataacatagtatgtggttaaaagaagtttccatttgcgaaacaaaaagaaagaatcaatagaaacagtatgaggaggaattgcaatgaaattagtaccattatttgacagggtagtattaaaaccattggttgcagaggaaacgacaaaatccggaatcgttttaccgggtcaggcaaaagagaaaccgcagcaggcggaagtaatcgcagtaggaccgggcggtctggttgatggcaaagaagtgaccatgcaggtaaaggtcggcgataaagtaatcttttccaagtattcaggaaccgaagtggaaggtgaaagcgaaaaagataagctggttatcgtaaaacagaacgatatcctggcagtgatcgaataaaccgaatccctgagaccttgagacaatatcaacaggcaataccgaaatcataacaaaaacgatagatagaaagaaactggaggaatgaaatcatggcaaagcagattaaatatggtgtagacgccagaaaagcactggaagccggcgtaaatcagttagcagacacagttcgtgtaaccctgggcccgaaaggaagaaacgttgttcttgacaaatctttcggcgctccgcttatcaccaacgatggtgtaaccattgcaaaagagatcgagctggaagatccatatgagaacatgggtgcccagctggttaaggaagttgcaacaaagaccaatgacgtagctggtgacggtaccaccacagcgaccgttctggctcaggcgatgatcaatgaaggtatgaagaacgtggctgcaggcgctaacccgattgttttaagaaagggtatgagaaaagctactgaggcagctgtagaagcgatcgcaaagatgagcgagccgatcaagggcaaagcttccatcgcaagagtagctgcaatttccgcagcagacgatgcagtcggcgagatggtagccgatgccatggagaaggtttccaacaacggcgttatcaccattgaagaatccaagaccatgaagaccgagttagacctggtagagggtatgcagtttgacagaggatacgtttccgcttacatgtgcaccgatatggagaagatggaagcaaacttagacgatccgtatatccttattacagataagaagatttccaacattcaggagatccttccattattagagcaggttgtacagtccggcgcaagactcttaatcattgcagaagacatcgaaggcgaggctctgaccactttaatcgtcaacaagttaagaggtaccttcaatgtagttgctgttaaggcacctggctacggcgacagaagaaaagagatgcttcaggatatcgccatcttaacaggcggcaaggtaatttccgaagaattaggctatgagttaaagagcaccaccatggatatgcttggacgtgcaaaatccgttaaggttcagaaggaaaataccatcatcgtggacggtgaaggcagcaaagacgagatcgaagccagaatcggccagatcaaggctcagattgaagagaccacatctgattttgataaagaaaaattacaggaaagacttgcgaagttatccggcggtgttgctgttatccgcgtaggtgcggcaacagagaccgagatgaaggaagcaaagcttcgtatggaagacgctttatccgcagcaagagcagccgttgaagagggcgttatcgccggcggcggttccgcttatatccatgctatgaaggacgttcagaaagtcattgacggtctggaaggcgaagaaaagacaggcgctaagattatcttaaaggctctggaagctccgttataccacatcgtggcaaacgcaggtctggaaggcgccgttattatcagcaaggtaaaagaagcagcggtaggcacaggctttgatgcttataaggaagaatacgtagacatgatcgaagccggtatcctggatccgaccaaagttacaagaagtgcattacagaatgcgaacagtgttgcatctaccttattgacaactgaatctgttgttgctaatataaaagaaaaaacacctgcagctccggctccaggcggaatggatatgatgtaataacggaagcaaaagcgacgcatgcgtaatgaaaagagggtttgcagtgcttgcattgcagatcctctttttgctatcacagaaattgagggtcccctctgcgtcaggctctttattccatcatctcccttcacagaagaaaggacaacagtctatgaatgaaatgtatgcagaatggctcgtaaaacggaaagcaccggcttatatgatgcttgtcaaggtattgatggttctggtatgtgtggtggcgttttttatcgccgtatcaccgctgctcggaatatttggtattcttgttctgtttgcggcagcggcggcagcctattttgtcttccgcaacagtgaagttgaatttgagtacctctatgtgaccaatcagctgaccattgaccggatttacggaaagaccaagagaaagaaagcctgggaaggttccatggatgaaattcagatcgttgcgcccaccggttccactgaggcgaaagaccatgagacgaataatatgaaggttttggatttttcttcccatatgccggatgcgaagacgtttaccttaatcagccagtccggcagtaattctacgaagattattttcgaaccgaatgataagcttcttcactgcatgaagatgacggctccgcgcaaggttgtggatcggatttagggatttatctgaaaaaaagatttaaaagagtttaaagataagcatggtaaggaaaagtagaaaaggacagatacacgtgaccgttttggccgcgtgtgtctgccctttttttatatgaaatacgccggaaataatgtctttcacacacggaaaacagatgaaaattgtccgttgacaagtggtgcaaaatttgttaaactatgtaactaacaagctaaaattattagctgtattaataaaaacgacgagaaagagaggaaaatttaatgggtacaattattggcgacggcattacttttgacgacgtacttttggttccggcatattcagaagtaatcccgaatcaggttgatttaacgaccaacttaacgaaaaccatcaagctgaatattcccctgatgagtgcaggtatggatacggtaaccgagcaccgcatggccattgccatggcaagacagggaggtatcggtatcatccacaagaatatgtcgatcgaggcacaggcggaagaggtggataaggtaaaacggtcggagaatggcgtcataacagatccattttatctttctccagaacatacattaaaggatgcggatgagctgatggccaaattccgcatttccggcgttccgattacagaaggcagaaagctggtcggtatcataacaaaccgggatttaaaattcgaagaagatttttcgcgtaagattaaggagtgtatgacttccagaaatctggtcactgccagggaaggcatcaccatgacagaggcgaagaagattcttgccaaggcaagggtggagaagcttccgatcgtcgatgatgattttaacttaaagggacttattacgattaaggatattgagaagcagattaagtatccgttatctgcaaaagacagccagggaagacttctgtgcggcgctgccattggaattacggccaatgtcctggagcgtgtggctgcgctggtggcctccaaggttgacgtcattgttctggactctgcccatggccattctgccaatgtattaaattgtgtgcgtatgattaaggaagcatatccggatcttcctgttattgccggaaatatagcgaccggagatgcagcaaaagccctgattgaagccggtgcagatgcaattaaggttggaatcggaccgggatctatctgtacgacccgtgtggtcgccggtattggtgtaccgcagatcactgcggttatggactgctacgctgtggcgaaagaatatggcattccggttattgcagacggagggatcaagtattcaggcgatttaacgaaggccatcgcagcaggcggcaatgtctgtatgatgggaagcatgtttgcgggctgcgatgagagcccgggaaccttcgaactgtatcagggaagaaagtataaggtatatcgcggcatgggatcgattgcggcgatggagaacggaagcaaggaccgctacttccagtcggatgctaaaaaactggttccggaaggcgtagaaggacgtgttgcgtacaaaggacttgtagaggataccgtattccagatgctgggcggactcagagcaggtatgggttactgtggagcttccgatattaagacgcttcaggaaactgcaaaattcgtaaagatcacggcggcttctttaaaggaaagccatcctcatgatattcatattacgaaagaggctccgaactacagtattgatgagtaagcagacgtgatatgtgatgattgttcccaagtttttaactgccggtataacccgtaattacggggtataccggcagtttccataccggaagagtttcacagatcccctcacggcatttcattctgggtctgtctgtccaggtcacagctccacaatttttcttaccgtatttgcggttcgtattgtaattctgccgctaacgcctgagctggcagtcttagaccaccaattcgttttttgataatcgttcctgctaaaggaccagaaaataacattgttatagtgatacacgttctcgtacccggtttcaggatcgccgatttcatcataaaacgcctcataagaaagaggaggcatgagaaatataagattatcatatcgttctttatgatcggttccccaccagtcaggagcgtgattcaacagctccttcagttcatcctgtaaaataataaaaaccggaacagccatatcaaaaatgtctgttatcatgaactgtattttatttgtaagaatcttgatatcctggacggtgcttgaaaagattacattgccgctgttcagatatgtagtaatctctgtaaaaccaagctctgcaaagcccttctttagttcagacatggatattttattttttccgcttctgttgattccccttaacaaggcaatatatctgttcatatgacacgttcctctctgctgcttataactgatttaagactgtctccaacgcataaatgcgactaactcagcatcggaaccagaaccactgtactcagataccataagatagttttcgtcggcaatcattccgtaatatctgtcactgccctttttggaaagctgattccctaaataaattttatcatcattccaaaacctgataatctgttcatttggcaaagtatattcaaggttgatgagagagcctttcagtgcatggagctctgtgatttcttccatatcttctatattaagtgcacgaaatgctgcaattaaatttcttttggactcacataattctttctctcctttttccagacataacgcagccatgcactctgcgccaaatggccggccgttcgtctccatgcagccattacaagtgctgcttaatccgcatttggtacaatcgattccgcaaatagatgcagccatttttcttttttcctccatcattttgattttatcaataccgggaagcagatgattcccttagaaccggcctgatatacttaaaatattgttcgggatcataataaaagtacatgattctgccgggggaagtatcgaggcagtaacctgattttgtgtagtcaaaatcagccattgccatttcaatcttttcttctacactgcaattttcctgttcataatcgaatggcccatgttcaaagacaatatattcggcttcgggaatatcagccataaccatctgcggcggtacgtttccatgatagtcactgggcagccgtacgccccagcactctgtacgcaaaatcccccaatcgcaaagtctgccgtttgggtcgttcatatatgccataatctgcccgcctgcgcagttggcttcgcttccgccttcgtcgtctaattttcccttgatgctgtcgagcaaaccgcagattgtctcgtagtcctgtcccggtatcagattttgtttacgccaaaaatcccaatatccattactctcgttgtttctaatgtgtaaaaatttgtgtgcaggtatggttacagagtaaattttaatatcatcggatgattgaatcataccaatttctcccaatcctaaaaagtagcggtcaaaaggggttatctttgtgcggagagccacgggggtcggatttttccggtattcactgggtgttacaccgtatgctcccttgaacgctctggtaaatgcttcatgtgatgagaagccataatcaaatgcgatatccagcaggcttttatcataatcccgaacctcctttaatgcaaaggctaatttcctttgccgcagatagtccctaaactgcatacccgaaatctccttgaatttcctggtggtataaaattcagaataacccagtttccgggaaagaaagcgcagtgtgagggcttcatcgttatagcttttgatacatttgtcaatttcatcaacaattacctgaatttgtttctgccattcgtacattctcttgttcacctcatttgtacctccctatattcattataaagacattgggcggccgctgcttgattttacttgctgttattttatttaattttatgatatccatttttctgtttttgcagtcacatgggattaactacagtacagtataccgattttgcggatcttacgtcaatggtgccggttaaaaacagttatcaaaaagtacggttcacggtgacggaggatgccggtgtttcaatacccgggtctgcatggctcgccgagccttgatggtgtgaaggagtatatatgtggtcgtcagattggttataagaggatttatttaataggatttatttaatatagaagaaaggctgttattttgaaatgatcagatttttcattcaaaaatggaagaatgaattttgaatgggggaaaatatgcaaattgtagctgcggatttataggagaatgtaatgggaaaatatgatattaaggcatgaaaacagaaatataactgaatattagataaataataataaaaatattgaattaatggtgcgtataatttaatttatctaccaattttgggaataaaactcggcattattaacaaataagaagtaaaaaattacaaagaaagaaatggaaaaaagttgaaatgtaaccattctgttaccatgaagatgtataatgcttctataattaagttttttgtaaggaaaataaaataaacggcagatttttttagaaggaacaggatgttttgattcgtacggattacttaaattaaattataagaaggtgagaaaattgtcgatagcaaaaatgagcatgcttgataactcatatcgctattttaccgtaacagtagaccggtatgagaggcagtgtatggagggaattatcagtcacgcgggagaaacacccggtatccgttatggtaactttcttgaattagtactccagatggaccagatattcaaccggatgtcgtgtccgaaacagaccatggaattccggaggtttaccggtactgattatccggcaccgaaagtgaaagaatgcaggaaggtatgtaatggaaaattagcaacatttcagatatatgtaaaattccgatatgacgccagctggcagggagatataacctggctggaggaagaacggacggagcactttgaaagcatattacagatgatccagctggtagacgaaattcttaccggaagatatagaataaaagatttgggaaaaggcgcaagaacatgccaggtagctgtaaactcctatgacagcggactgttggaaggaagtgtacagaacgcatttatcaatcatctggaggaattcaaaggaaccattggcctggctgatgctatggtccatttatttgaggttggaatcggcaggagtgcttccgggacagcccagggagaatgcaagatcatttcagaagagacctgggatacctaccggaaaggcggcagaaaagccacctttgtaataaaaatcctgtacagggaacactcaacctggcagggcgtgatatgctggcgggaaaccggcgaaaaacaggctttcagaagctttctggaaatgattattctgatggcctccgctttggaaatcggaagcggggataatgagtgtgaagatagatactatactgacaatcgacaaaagaccataaaggaagggtaaggaaggagagaaagtatgaaaggactaagaagaaagttcaggcgagggctggcaggttttctggcgttcgtgctgacgatgacatcatttaatatggtgtcgtgggcggatgtggcgagtgcgtttgagacagaaaaggccacgtttgtcatgagtggagaggagatcagggaatctgctcaggctgctattgacagcggcagtacattccattttgaggatttaggcattgaagaatcggaagataatgcgaaagattatcaaaaattattcggcagtggatcagtgtatgagattgctccgtcatataatatgtccgatgatgaagatgcagatggtgctgatctcagagtatttgttcgaataaaggatgattatgaggggtatcgcctgactggaaaagaggagattatttttctttatattaatgactcagaggggaaaatatcttttcgtacaattgttgatggatatgcaactgaaaggattacagtcaaaggaaattcgaaactggcagaagcagaagtaccaggtaacgtaaatggaacactggaaggagaagtgacaacaccggaagaaaatggaacgccggaaggagaagtgacaacaccggaggaaagcgggacaccggaaagtgaagtgacaacaccggaagaaaacggaacgccggaaagtgaagtgacagcaccggaagaaagtggaacgccggaaagtgaagtgacaacaccggaagaaaacggaacaccggaaggagaaatggcaacaccggaagagagcggaacgccggaaggagaagtgacaacaccggaagaaagtgggacgtcggaaggagaagtgacaacaccggaagaaaacagaacaccggaaggagaagtgacaacaccggaagagagcggaacgccggaaggagaagtgacaacaccggaagaaaacagaacaccggaagaagaagtgacaacaccggaagaaaacggaacattagaaggagaatcggataatgaagacgcggcaatgtcggaagataataccgtagtttcaattagtcgtaattcttcggctgtgttgatgtcggcagattcaaccgtaacagtgttagagtcagctaatgagaaaaatgataaaattacactggcaactgccagtaactctgaaaacagcaattccgggaagtcagatccgaaggaatcatcttccgtagctaatttagtaaacgggaaagtatatggcaatgtaattttggatgaatcttcttatgccagggcatatgttattacactggatgctttaaatattgagcaaccactgaatgagtaccaaattaaagtaactcatcggcttcatggtgataactggattgattatgaaaaaatagagactgtaacaattacagataatgattttgacaatggagaatatgatactgctaaactggaatttaagcgtgagggaattgtattaacaagccagagcttagttttgacaaaagatgcttttaaatcagggactgaagctgaaattactctggagtatgcagttgcagatggatacaggatttatgataacagagcgaatttgagatctatttttgttggagagttggatgatgatgatccagttattaaaccagtaggccaggcagtcgtcaatattaaatatgtatatgaaaacggaacgattgcgaaggatacagaaagtgtagctgctttatatgatgaaaatacaaagaagtataagttaacctatgagttaggtggtttagatggttataagccggtactggatacgatggattcggcatctggaattacccttgatggcaatattttgacagcaaatctctctgaagataaggagtacctggctgtaattgtttatatggcagatacagttgaatatgtggtaaggtataattatcagaaattggatggatcttatgaggtgaaagagtctgaaacaaaatcagggaaagccggagaattgagtgcggcagttgcccaaaatgttacaggctttactccgaagcagattagccagaaagaactgtctgcaacagaagagaatattgttgatattttctatgatcgaaatatatatgatctgacatatagtactgatggtggagaatatgttgaacgacagactggattgtatggagagagtctgacggtagcgaagagcacaaccaaggctgggtatttgtttgatggctggtatacagataagaatttctctcagggaaccagggtatccggtagtatagtattagaagataatacgatattatatgcaaaatggaatccaggaacagttgggtataaggtggtttatctgattgaaaatgcagatgataacaattattcgctgctgtgtacagatgcaaaaactggaaaaaccggagataatgtacagataacagcaaaaactgctaatccaacaaattggggcgaactggagaaaaacgcatttacttttaaggattcaacaagtgaagttttaaaggcagatgggacatcgatagttacggtaagatattccagaaatacatatacgattaggttccaggataaatctcctactttatgcaggatggaaagtcatacgcatacattaagcaattgttataaacgtacatgtaataaattgcataaacataatgaaagttgctatgatatgtcttatacaatttgtggtttgactgaacatcagcatgacagtacttgttatactcgagatataagtgctaaatatcaggctaatatcagggaacagtggttagaaaattatggtggacataactggctttggagtggaagctcctatactagcttacaggatattatgccatatgtttcaggaaatgggattaaagtattaaataaacacaatgatggtccaactcctagaccattagagtattatgtagaagatcctaatggaactataaaagatcctaaaggaggtagtaccaaatttagtttatacactaaaattacaatttatttggaaaagggatccactccaagttgggatgaagagtattatgagattgatggatatgaaagatattacacaaatattgattttagccgcccatcatttaaaaatccatctacattttattatacaagagctaaatatgatttgacacttataaatggaacgaatgaaaccacaaaaaaagacattccttataaatctgatataagcaaatatcttggagctccgacggttaagcctacgtcagatgcaacttttgatgcgtggtatgttgattccagctttacagaaaagtatacatcgggtaccatgccaaaaggaaatctcgttttatacgcccactggaacaatgctgcttatgatgtgacatttaaagatggtcaggagatattagatacagtagaagtaaacagtggggagctggttacaccgatttccacaccagaaaaagctggttatagctttactggctggtatatagatgaagcatgtacgcagcgatatgatttccagagaaaagtggaatcagattttgatctttatgcaggttggagcatgcattcaactaccagctatcagatattatacgtcacaagcgaaggtgatccggtagcggattctgtgacgggcaatggagtcataggagatacaattcaggccaatgcggttgttccaacgatagccggatatgaagattatattgttgataaggctacagcctccataagtttagatgccgatcccaataaaaatgttataagatttatctattcaagtccggaatcattgagatatacggtacagtattggtatgaagataaaatagttgccgaagaagcaaatattgcatcgaaattaagttctttccgttgttatccgaacactgacttagagcagttgaccggatataaagtaaaggaagcgtacaaaaatgttaagttaactacaggtgaaaatataattaagtttactttgacattaaatgagtacacaattacatatgaaaatgtagattataatgatattgtttgggaaaatggcaatacaaatcctacaaaatacaatattcgtaccaattcctttactcttaaaaatccaggccgtgttggatatacatttatgggctggaaattggttaaaggaagcgttgaaagcggagaatatgactctaaaaatgtagtaattgaaacaggttcccgtggaaatcttacctttaaggctgagtgggcagtagatgtaaaccagaagttaaattatagtataaaatactataagagcgaacagccggataaggaaataggaaatcttaacaagaatgttcttgttgcttctccgacagttaagtatgcagatgtagataaaacatataataagccaagtggttatattctggataaggtagagtttggcggccagactgtaagcgatggtgaaatgacaatcacagatacagataatattattaaggtatattataaagtagatgagacacaaaaactaaaatacagcgttgagtactatatcgatggaaaagatataccttttgataaactggataatcaggaagtattggttgccgatccggtagtcagtgaagtagcagacagcagtaaagtgccggccggctatacgagagacagcgtattaccggagttgcctgcaacgatcagcgagacagctaatgtcatcagggtatattacaaagtagatgaaacgcagaagctgaaatacagcgttgagtactatgtaaccggaaataacacaccattcgataagcttgagaaccaggaagtactggtagccgatccggtagtcaaggcagtagcggacagcagtaaagtgccggttggttatacgagagattctgtatatccgaagctgccggtaacgatcagcgtttccaacaacgtcatcagggtatactacaaagtagacgagacgcagaagctgaaatacagtgtagaatactatgtaaccggaaatgacacaccattcgataagcttgagaaccaggaagtattggtagcggatccggtagtcaaagcagtatcggacagcagcaaggtacctgccggctatacaagagacagcgtattaccggagctgcctgcaacgatcagcgagacagctaacgtcatcaaggtatactacagagtagatgagacacagaagctgaaatacagtgtagaatactatataaatggaaatgacacagcgttcgataagcttgagaaccaggaagtactggcagcggatccggtggtcaaaacagtagcggacagcagtaaagtaccggcgggttatagaagagattctgtatttccagagctgccggtaacgataacagaaagcagtaatatcataaaagtatattaccgtattgatactactcaaaaattgcagtttgatgtagagtattatcttgttggtgagatggaagcatttgatgcagtcagaaatcagacagtccttgtagcgaatcctgtgatcaatgcagtagcagacagcagtaaggtgcctgcaggctacgagagagcctatgtaatgccgcagctgccgactataatcagcaagactaataacgtcatcagggtatactataaagtagatgagacacagaaactgaaatacagcatcgaatactatgtaaatggaaacgacacagcgtttgataagcttgagaaccaggaagtgctggtagctaatccggtagtcagtacagtggcagacagcagtaaagtgccggccggatatataagagaccgtgtgttgccagaactgccgactacaatcagcggatctaacaacgttatccgggtatattataaagtagatgagacacagaaactgaaatacagtgtcgagtattacttgaacggaaatgacacagcattcgataagcttgagaaccaggaagtgctggtagcggatccggtagtcaaagcaatagaggacagcagcaaggtgccagttggctatacaagagacagcgtattaccggagctgcctgcaacaatcagcgagacagctaacatcataaaggtatactacagagtagatgagacacagaagctgaaatacagcgtcgaatactatgtaactggaaatgacacggcattcgataagcttgagaaccaggaagtgctggcagcggatccggtagtcaaagcagtagcggacagcagcaaggtacctgccggctatacaagagacagcgtattaccggagctgcctgcaacgatcagtgagactgctaatgtcattaaggtatactatagagtagatgaaacacagaaactgaaatacagtgtagaatactatataaatggaaatgacacagcgttcgataagcttgagaaccaggaagtactggtagccgatccagtggtcaaaacagtagcggacagcagtaaagtaccggcgggttatagaagagattctgtatctccagaacttccggtaacgataacagaaagcagcaatatcataaaagtatattaccgtattgatactactcaaaaattgcagtttgatgtagagtattatcttgttggtgagatggaagcatttgatgcagtcagaaatcagacagtccttgtagcgaatcctgtgatcaatgcagtagcagacagcagtaaagtacctgcaggctatgagagagcttctgtaatgccgcagctgccgacaataatcagcaagactaataacgtcatcagggtatactataaagtagatgagacacagaaactgaaatacagcatcgaatactatgtaactggaaatgaaacagcgtttgataagcttgagaaccaggatgtgctggtagctaatccggtagtcagtacagtagcagacagcagtaaagtgccggccggatatacaagagaccgtgtattgccagaactgccgactacgattagtggatctaacaacgttatccgggtatattataaagtagatgagacacagaaactgaaatacagtgtcgagtattacttgaacggaaatgacacagcattcgataagcttgagaaccaggaagtgctggtagcggatccggtagtcaaagcagtagcggacagcagcaaggtgccagttggctatacaagagacagcgtattaccggagctgcctgcaacgatcagcgagacagctaacgtcatcaaggtatactacagagtagatgagacacagaagctgaaatacagcgtcgagtactatgtaactggaaatgacacggtattcgataagcttgagaaccaggaagtgctggcagcggatccggtagtcaaagcagtagcggacagcagtaaagtaccggcaggttatacgagagattctgtatcaccgaagcttccgacaacgatcagcagttccaacaacattatccgggtatattacaaagtagacgagacgcagaagctgaaatacagcgttgagtactatgtaactggaaatgacacagcattcgataagcttgagaaccaggaagtgctggcagcggatccggtagtcaaagcagtatcggacagcagcaaggtgccagttggctatacaagagacagcgtattaccggagctgcctgcaacaatcagcgagacagctaacgtcataaaggtatactacagagtagatgagacacagaagctaaaatacagcgttgagtactatgtaaatggaaatgacacggcattcgataagcttgagaaccaggaagtgctggcagcggatccggtagtcaaagcagtagcggacagcagtaaagtaccggcaggttatacgagagattctgtatcaccgaagcttccgacaacgatcagcagttccaacaacatcatccgggtatactacaaagtagacgagacgcagaagctgaaatacagtgttgaatactatgtaactggaaatgatacagcattcgataagcttgagaaccaggaagtgctggcagcggatccggtagtcaaagcagtagcggacagcagcaaggtacctgccggctatacaagagacagcgtattaccggagctgcctgcaacgatcagcgagacagctaacgtcataaaggtatactacagagtagatgagacacagaagctgaaatacagtgtagaatactatataaatggaaatgacacagcattcgataagcttgagaaccaggaagtgctggcggcggatccggtagtcaaagcagtagcggacagcagtaaagtaccggcgggttatagaagagattctgtatctccagagctgccggtaacgataacagaaagcagtaatatcataaaagtatattaccgtattgatactactcaaaaattgcagtttgatgtagagtattatcttgttggtgagatggaagcatttgatgcagtcagaaatcagacagtccttgtagcgaatcctgtgatcaatgcagtagcagacagcagtaaagtgccggcaggctacgagagagcttctgtaatgccgcagctgccgacaataatcagcaagactaataacgtcatcagggtatactataaagtagatgagacacagaaactgaaatacagcatcgaatactatgtaactggaaatgaaacagcgtttgataagcttgagaaccaggaagtgctggtagctaatccggtagtcagtacagtggcagacagcagtaaagtgccggccggatatacaagagaccgtgtattgccagaactgccgactacgattagtggatctaacaacgttatccgggtatattataaagtagatgagacacagaaactgaaatacagtgtcgagtattacttgaacggaaatgacacagcattcgataagcttgagaaccaggaagtgctggtagcggatccggtagtcaaagcagtatcggacagcagcaaggtgccagttggctatacaagagacagcgtattaccggagctgcctgcaacgatcagcgagacagctaacgtcatcaaggtatactacagagtagatgagacacagaagctgaaatacagcgtcgagtactatgtaaatggaaatgacacggcattcgataagcttgagaaccaggaagtgctggcagcggatccggtagtcaaagcagtagcggacagcagtaaagtaccggcaggttatacgagagattctgtatcaccgaagctgccgacaacgatcagcagttccaacaacattatccgggtatactacaaagtagacgagacacagaaactgaaatacagtgttgagtactatgtaactggaaatgacacagcattcgataagcttgagaaccaggaagtgctggtagcggatccggtagtcaaagcagtagcggacagcagcaaggtgccagttggctatacaagagacagcgtattaccggagctgcctgcaacgatcagcgagacagctaacgtcatcaaggtatactacagagtagatgagacacagaagctaaaatacagcgttgagtactatgtaactggaaatgacacggcattcgataagcttgagaaccaggaagtgctggcagcggatccggtagtcaaagcagtagcggacagcagtaaagtaccggcaggttatacaagagattctgtatcaccgaagctgccgacaacgatcagcagttccaacaacattatccgggtatactacaaagtagacgagacgcagaagctgaaatacagtgttgagtactatgtaactggaaatgacacagcattcgataagcttgagaaccaggaagtgctggcagcggatccggtagtcaaagcagtatcggacagcagcaaggtgccagttggctatacaagagacagcgtattaccggagctgcctgcaacgatcagcgagacagctaacgtcatcaaggtatactacagagtagatgagacacagaagctgaaatacagcgtcgagtactatgtaaatggaaatgacacggcattcgataagcttgagaaccaggaagtgctggcagcggatccggtagtcaaagcagtagcggacagcagtaaagtaccggcaggttatacaagagattctgtatcaccgaagctgccgacaacgatcagcagttccaacaacatcatccgggtatattacaaagtagacgagacgcagaagctgaaatacagtgtcgagtactatgtaactggaaatgacacagcattcgataagcttgagaaccaggaagtgctggtagcggatccggtagtcaaagcagtagcggacagcagcaaggtgcctgctggctatacaagagacagcgtattaccggagctgcctgcaacgatcagcgagacagctaacgtcataaaggtatactacagagtagatgagacacagaaactgaaatacagcatcgaatactatgtaaatggaaatgacgcagcattcgataaacttgaaaatcaggaagtattggtggctgatcctgtagttgcttcagtggcagacagtaataaggtaccggcaggttatacaagagatcatgtaatgccggaacttccgacgacgatcaccgagtccaatcatgtaatcagggtgtattacagagtagatgagacacaaaagctgagatatgacgttgagtattatgtagatggaaatgatacggcatttgataagctggaaaaccaggaagtactggtggccaatcctgtagtcaatgcagtggtggatagcagtaaagtgcctgccggctatacaagaaacagtgtattgccagaacttccgacaatgatcagcgagtctaacaacatcattaaagtatattacagtgtagatgagatgcagaaattaaaatacaatgtcgagtattatataaatggaagtgctacggcctttgataagcttgagaatcaagaagtattagtagccgatccttacgtcttatttgtaaaagatagtgcacttgtttcggcgggatatgtcagggatagagtagaaccgttattaccggcaaaaatagtacatgatggagatattataaatgtgtactacagagccagaactgatttgtactcagaaatcaattattattatgatgacacaaagacagatacccaaaaagacaataatgcagtatttgatactggtatacttgatggtgttaaggtagagatggaagtcactcatactgatggcaaacattatgttttggacagaatcgaaggcaaggacaaaaaagtaacagttaacccgaccgagaacattgttaatatttactatgcacttgacgagaaggggactggtacagatccaaataagccggataatattccagataaatatcagataacttttacgtatgtcgctggtgaaaatggtaatgtggatggccaaaaggaggaagtaattaccagagaactggatgctgatggaagttttagttcaataaatccagcttatccaggagcattagtaaaagcaaatgcaaataacggttatagcttccaaaactggacatcggatgaagtgggtatgatggcaggaaagccagtaagtacatttgctgatgaagcagctattagagaggcagggtttattacagatacagtgtttactgcacacttcaatgcgaaagaagatacttcatacagaattgaatattattatgaagttcagggacagtatccggcaactaccaataactatgaagtcagaacaggtaagactgatacaaccgtgtctgtgaccgataatgacaaaataaaagctggatataagtatgacactgaggcagctaacgttgtgagtggggttgttaaaggtgataatagtctggtcttaagactgtactttaaacaacagtttacagtaacgtatcagtcaggtaatcatgatttctttgaagaacaggtgattggcgagaattcttatggtgataagacaccagtatttacaggagagatgaatataagaggcaattatgtattcaatggctggcagccagttatcgctgaaaaagtaacagaaaatgcagtttatgtagcacaatggcgatatacgggaagtagtggcggagacaccggtggtggtggaaatactccaagcgataacaagccatatgttccgaatggccctggtgatacagtgactattgaaccaggtgatgtaccattagcaaatgtgccggaaaatggtcctgtagataatttgatgctgattgatgatggtaatgtaccgcttgcaggtctgcctaaaactggcgaccgttttggaacaaatacaggtttagcagctttacttaccgggttcctgttagcagcatttacagcgctgaataataagagacgggaagaagaaaacaagtaataacagaaggacaatcgattaaaggagatggtctggcagtgtgaatctgccagaccatctcctttttatgtaagcgccaaaattttgggcggattgtaaatcaactccgccgcctccataatggtagtcaggtagttttttactacacttttatttaggagggcgaccatggccaaatacaattcacgccgttccggaccggagtggcttcgacttattaccgagtgccgccagagtggtatgcccgacaatgtatggcgcttactttgctactacatggaagtattgcttagaacaacaggaataataaacataccttatataaaagagtatttagagtttcttctatgccgcaggcaacaatcaggtactttactaaattcttttatctaaaatatttcaaaatattctcttttgagcaaaatatctctgctctattttcacgatgaacctatctatacaggcgctttgattaaaaatatttttttgggaaattgactaataaagatatctgatttgatgagattagtattatgtgctagaacgtaagaatgaatgacaagccaagtgatattattgtatagacttattgagtaaaaaacaaatgaaaacatataaaaaatgtaaaaaatatgaatagtacatataatttattttatgggttttaatccacaccgtctgatatataggaaagctaaaaaaagaaaataaattatggaaaattcttgaaatgtactgtagtgtggtcacaaactggttacatttcaagaattttccataatttattttctttttttagctttcctatatatcagacggtgtggattaaaacccataaaataaattataggaaggtggacaatttgtcaatagcaaaaatgagtatgatccataattcatatcgttattttactatttccgtagataaatatcaggaccgatgtatgaagggggttatctatcatgcgggaaaaactccgggtatccgttttgataattttctcgaaatggtgatacatatgaatcgcatctttgacagtatggcgtgtccaaagcaggcgatggaattgagacaattttcaaatgttgaatatcccgaaccggcaatccgggaatgtaaccgctaccagaatggcagactggcaacgttccaggtatacgtgaagtttcgatacaacgccagctggcagggagatattacctggctggaaggtgaacagactgaaagctttgagagtctgctccagatgcttcagttgattgacagaatatttactggtcaatcggaaatggagaaagacattaagattaccagagtctgccagatagctgttaattcctctgaaaagggtctgctaataggaagggtacagaacgcagttattaatcgtttggagaagtttaagggaacgattggcctggcagatgcaatggtacgtctgtttgaggcaggagaaggagatcatgattccggaaaaatcatctcagaggaaacatgggattcctatcgtttaggtgggaaggaagcaacattcctgataaaaatcctgttcagggaacactcaacctggcagggaatcatttactggcgtgaaaccggtaaaaggcaggctttcagaagctttttggaaatggttatattgatggcttctgcattggaaagcggcaagaaaaggagtgagtgcgaagatagatctattacaactaataatagaaagaaagtcctgatggagggctaaggaaggagaaaaagtatgaaaggacttagaaaaaagttcagacgagggcttgccgcgttcctggcatttgttctgaccatgacatcggttaatacggtatcattggcagatgtaacaaatgcattagagacagaaaaggctacctttgtcatgagcggagaagatatcgtagaatccgctcaggctgctattgacagcggcagcacctttacttacgaggatctcggaatcgaggagacaggaagtacagctaaagaatatcagaagctatttacaaatggcactgtatatgaaatcgccccttcttatgacctggatgaagaggaaaatgcagacggagcgaatcttcggatgtttattcgggtaaaaggtgaaacagaggggtatcagatcactggagaggaagaaattattttcctttacatcaatgattctgaatccaaaattgcatttcgttccagaatcgatgattatgtaacggataaggttacggttaaaggaaattcttcttttgcagaaaccgaaaagccggcacttgatgagaatggaaatgcattggagggagataagccagcccagaatcaggaggaagccactgctcccgaagaggaaaacggaagtgtagaagagacgaaggagccagaaacagaggcaccgacacaagttccggaaacagaagaatcgatacaggaacctgagacagaagcaccagtgcaggaaccggaaacaacagctcctgcaaaagagccggagacagaagcgcccacacaggcagaaatagaaaagccaacgcaggcgccggtacaggaaccagagactcaggctccggaaactgaggctgtaacacaggccccggaagtgcaggaaacagaagcaccagtgcaggaaacagaagcacctgcacaggaaccggaaacggaggcaccggcatcggaagcagagacagcagcaccggatacagccaatgaaactgcatcgattataaggaataaaacattcactttaacaactgcaatggaagcagctccaggagaatcagatgtatcaattgtagatgaagagataccgaaagcggatagtccgaaactggatgcagaaggaaataagtcttcagaaagccctgcagcagtaagtacaggaagcaatgcagagaaaggtgatcacgccgattctggagagaataaaccttcagagaagatcgaaggcaagacctatggtcatgtattgctcaatgaagagagctatgcgaaagcatatgtaacgactcttaataaaatgggggtatctgttgaagtaacggaaggattaactcttacgattcatcacaatgcgttttataatgatgaagatatatcggaagatgaagtgattagagggctgaaagcaggagatgtgatcaatccagccgattatgcgtgggaaaaagatacgcttacctatttgggcagcataccggagcagataacaatccgtgatgaagcagataataaaattgaattgttttatgatgagattccggtagaaaaagaagaagacgaagtacgaattctgaatgctgtgccaagaaattattaccgatcgagactttcagatgataatacgacgcctggtaaagtatttcctaccaaaacagcagaatgggtagacgaagaaaatggtattgctaaaattgacttcactatctatggaaatcctgttcgtaagggcagtgatgttattttaatagtcgatagctcaggaagtatggcaggaactaaatggtcgacggccaaaagtggagcgaaaggatttgtagacaatttatacggagcggtcgatggagttccgtcagataatcgaattgctatcgttgattttgatagcagtgccaaagcttatccgggcatcaataactcgacacaaacatttttaaaagtgagtgatacgataaaggttggtaaagaatctgtaacctatactgcgaaagattattttaaaacttatgttttagataataaaatgaaggcttcagggggtacaaattatgattatgctttccaggccgctcagaaaataattgataatcgaacggacgcttccaggcccgtatatattgttttcatgagtgatggtgagcctcgtaataatgctttgtcaccctatcatgatggccaggctgaggccgctgagttaagagcgcagggagttacaatatattctattggattaaatattggaaacaataattttgataattttattgttcctttagcttctactccaaaatcaacctatgcaatcaacattgaaaatacaggtgatctggtaggaatctatgatgcaatagcaagttccattaaaatcgccggaaccgaagcaaccatcaccgacgtaatcaatacagaagccttcgagattgcagcggactacaacaatggcatgtggtatgaagcaagcacaggtactgtaagtaaaagttcagacaataaaacggttacatgggattttggcaatatttctgccaataaggaaacacttactatctatattaaagtaaaagataccgtgccgggcggaaccgcaccggatacgaacaaagaagccagagtcgattatacggatcctgatgaacagtcacagactcaggatatcccaagccccaatctggcggttggagatgttggtaccattacattaaactactatctggttaatgaaaatggtgttacaatcaatggaaccggtgaagtgattgatttcgaacgccgtcagcagctgggaacacagctctatagagatgcacctcagaagtttggcagctattccgtcccggcgccgtcaaccatagaatataatggcattcaatatcagtatgtggcagcgagcgcagaccatgatggaagcagcagtcctgcaaatgtagaactgagtcctgctaaaaaatcagttcatttatactatggatatcagcaaatcaaagatgtcacagtaacctttaatggaaatggaggtacgccaagcgcaggcagtgtgacagtaccgaaagatacttctttgggcagccagattgcaactgctgaacgtgatgatcacaatttcctcggctggaatacacagtcggatggtacaggaagttcctttacttctaataccatcgttacagatgacatcactgtatacgcgcagtggcagaaaaagcaggcgctgaccattaaggcctctgatgtagaaaaagtttataatggtgaaacgcagtctgtatcagcagaaagttacgaatggagcggcttaaaagcaggtcataaaattataaatattaaaactatcggttctggccgcgatgtgaaagacggcggctatccgatcaccttcacagacactgcgataattgtaaatggctcaggtgtagatgtaacaaaagaatatacaattacaacagagccgggaactttgactattttaccgaaagcagtgacaattaaggtagataacagttttaagtattataattccaatgacccggttttcaccggtaaggtagaaggtcttgtaaaccaaacggatcttggcaatgtaacatatgtgagaacgaatgaagctgaggacgtaggcgtttatgaaaaggtgcttgctgctaagtatattgaaaataagaactatacagtatcggagaccagaggcaattttgaaattaaagtagctacgatgccgggggcttcgttaacagcgaagggcggcagctggccatatgacggaaacgcacattatgcggcggcaagtcttaataaggcggatggctataccgtatactacaaagtaaaagacggtgaatggacaatcgatccgccaagcgtgaccaatgtgtcggaaggcgttgtaaccgtatctgtaaaagcgacacgaaagggctatgtggatctggtaactgatgatgtcaagttacagatcacaaagaagccggtgactatcactgtaaaaaatgctgaaaagacctttggtgaagcggatcctgtttttgaaggaacggtacaggggcttgtaaatgatacagatctcggtgaagtcacttataaaagaacgaatagtacccagaatgtaggaacctataacaaagtcctgattccggagtacacagaaaacagtaattatgatgtaacagtaaatgaaggtgactttaccataaaaccggcaaaggatccggaagcagacttaaagatagccggcggcagttgggtatatgacggaaaagagcacaaagttaagctgaatgtcatagattctgcactggcggctctcaagagatataaaattgaatacagtaccgatggaggcctgacctggtcgaaggaagtaccgggagtcacgaatgtaaccgacggaacagttactgtaattgccagaggaacacgtgaaggctatgaaacgctggtatcaaacacagccgatttgtcgattactccggctccggtaacgattgaggttgatgatgcatttaagtattttggagagaatgatcccgactttacaggaacgccaaaagggcttgtaaaggccggagacatcggaaccataacttacagcagaaccaataaagatgaagatgtaggtgtatatttggaagtattgactgcatcttatactccaaataccaattacgatgtaaccatagataaaggtgatttcgaaatcaaaaaagcatcgatcgagggtgctgtactgacagcagttggcggagaatggacttatgacggagatgcacatgcggcaaaggccagtttagagaatgcatctgggtatacaatctattataagaccggaaacagtgaatggactactgcagcaccaagtgtgacaaatgtagcagaaggtactgtaacagtatctgtaaaagcagaccggtatggatatgaaacactggaggcagacgatataacacttaaaattctgcccagagatgtgactattcaggtcacggatgcagagaagttcttcgataagcaggatccggcatttagtggaaccgtgtccggattagtaaaagcaggggatattggaactgtaacatatttcagagaaaacacggcggaagaagttggaaagtatccagaagtgttgtctgcagactatacacaaaatgacaactatactgtctatgtgaaaaaaggcaattttgaaatcaagacggcgacgatggaaggcgcttcattagaagcagccggaggaagctggacgtacgatggaaaaacgcattacgcacaggcagaacttacaaacgctgatggctataccatctattatcaggtggggaatggcgaatggaagacggaaataccaggcgtcaccaacgtatcagagggtgaattaactgtatcagtgaaggcagtgaaagatggctatgtagatcttgtgacagaggatgtcaaacttgtcattacgccaagagaagccacgatcgttgtaagtgatgcagaaaagttcttcgatgaaaatgatccgttatttagtggaacagtgaataatctggttaagacgggcgacctgggaactgttagatattacagaaacaatgatgaagaggcagtaggaacttataccgaagtattaacggcagattataccgccaacgacaactatcatgtaagcgtacagaatggcgactttacgattaagaccgcttctattgcgggggcagaattaactgcgaccggaggaagctggatctacgacggcgcggcccatgcagcagccggagaagtagagaacgcagatggctacacggtttactacaaagtcggaaacggcgggtggaccacagatgccccgagtgtcaccaatgtagcggacggaattgtaacggtatctgtaaaagcaaccagaaccggttatgaagagctgacagctgccccggttacactggaaattattccaaaggatgtaacgattatcgttgatcctgcggagaagttctttgatgaggcggatccgaagtttacaggaaccgtgacagggcttgtaaaggatggcgatttaacagggctgacctatgtcagaaccaacgatgatgaggaggtcggcatttatgagggagtacttgcagcggcctatatccaaaacacgaactacattgtaaccgagcacaagggaacgtttgaaatcaagacagcgaccataaaggatgccaaagtgacggcagccggaggaagctggatctatgatggaaacgcacatgcggctactgcatctcttagaaatgcagatggatataccatttactacaaagccggtaacggcgactggaccacagctgccccgagtgtcaccaatgtggcagatggaattgtaaccgtatccgtcaaggcaacaaagaccggatatacagatttaacaacagaagatgtaacgattcagattacaaagaagcctgcggccattacggtaaacaatgcggagaagttctttaacgaggcagatccggtatttaccggaagcgtaacagggctggtagtggacggcgatctcggaagcgtaacctatgtgagaaccaacagtgcatcaggtgtgggaacgtatgagaaggtgctggatgccgtttacacagacaacacaaactacgaagtaaccgtaaaacgcggcgactttaagattaaggaagcgaaggacccggaggcagagcttaagattgccggaggaagctggatctatgacggtaaagagcacaaagttaaactggacgtcatcgattccgttctggcagcgctgaagagatacaagatcgaatacagtacggacggaggaaatacctggtctgagactgtaccgggagtcaccaatgtagcagaaggaaccgtaactgtgaccgcaagaggaacccgtgaaggttatgagaccctggtatccaacgagacaacgatccagatcacagccagaaccgcaacgatccgggtaaaggatgcagagaagttcttcgatgaaacggatccggcatttacaggaacagaagagaacctggtaaaagcaggggatctcggaacggtaacctacagaagaaccaacacagacgaagcggtcggaacgtatcagaaggtgctgacagctgagtatacgccgaacaccaactatcttgtaactgtcgtaaagggaaacttcgaaattaaaacagcctccatagaaggagcaaaggtcagcgctgtcggaggaagctggatctatgacggagcagcccatgcagcggaagcggccctggaacatgcatccggctacacggtatattacaaagccggtaacggagactggaccacagaggccccgagtgtgaccaatgtactggaaggaaccgtaacggtatccgtaaaggcgacgagaagcggctatgcagatttaatgacagacgatgtaaccttaaagattacaccgagggaagccacgattacagtggatcatgcagataagttctttgacgagcaggatccggattttaccggaacaacagcaaaccttgtcgcatcgggagatctgggaaccgtaacgtataagagaaccaacacagacgaggcagtcggaacgtatcagaaggtattgaccgcagaatatgagtcaaacagcaactacgttgtaattgtagaaaagggagactttaccattaagacggcaatcatagaagatgcggttctgacagcagccggaggaagctggatctatgacggaatggcccacgaagcaaaagcagagcttactaatgcacctggctatatgatctactataagacaggaaacggcgactggagtacaacagctccgagcgtaaccaacgtatcggacggacttgtaaccgtatctgtaaaagcaacgaaaacgggctataaagacctggcggctgacgatgtaacattaaagatcacaccaagaacggcgacaattacagtaaataatgccgagaaattctttgatgagccggatccggtattcacaggaaaggtaaccggccttgtaaaagacggagatattggaacggtaagctataagagaacgaattcagaggaagcggtgggaacctataaaaaagtcctgactgcagaatttacagacaacagcaactacgacgtgactgttgagaaaggtgatttccagattaagaccgcatcgattgaaggcgcagctttaacagccgccggaggaagctgggtatacgatggatatgagcataaagcagcagccagtgtacaaaacgccgatggctacacgatttactatatgacagaaggcggatcatggagtccggaagcaccgggtgttaccaatgtctcagatggaaaagtgacagtgtctgtcatggcggtaaagaccggttataaaaatctggtaacagaagacgttactcttgaaatcacaccaagagatgcttctatcgttgtaaatgatgcagaaaagtattttgacgagccggatccggtatttacaggaaccgtaactaatctcgttaaggacggcgacttaggaaccgttacttaccgcagaaccaatacggcagaagaagtgagaacctaccagaacgtattgactgcagactatgtcgggaacagtaactatattgtaacagtggaaaatggcgactttacgattaagaccgcttctgttacgggggcagaattaactgcgaccggaggaagatggatctacgacggcgcggcccatgcagcagccggagaagtagagaacgcagatggctacacggtttactacaaagtcggagacggcgggtggaccacagatgccccgagtgtcaccaatgtagcggacggaattgtaacggtatctgtaaaagcaaccagaaccggttatgaagagctgacagctgccccggttacactggaaattattccaaaggatgtaacgattatcgttgatcctgcggagaagttctttgatgaggcggatccgaagtttacaggaaccgtgacagggcttgtaaaggatggcgatttaacagggctgacctatgtcagaaccaacgatgatgaggaggtcggcatttataaggaagtacttgcagcggcctatatccaaaacgcgaactacaatgtaaccgagcacaagggaacgtttgaaatcaagacagcgaccatgaaggatgccaaagtgacggcagccggaggaagctggatctatgatggaaacgctcatgcggctactgcatctcttagaaatgcagatggatataccatttactacaaagccggtaacggcgactggaccacagctgccccgagtgtcaccaatgtggcagatggaattgtaaccgtatccgtcaaggcaacaaagacaggatatacagagttaataacagaagatgtaacgattcagattacaaagaggcctgtgaccattacggtaaacaatgacgagaagttctttaacgaggcagatccggtatttaccggaagcgtaacagggctggtagcggacggcgatctcggaagtgtaacctatgtgagaaccaacagtgcatcaggtgtgggaacgtatgagaaggtgctggatgccgtttacacagacaacacaaactacgaagtaaccgtaaaacgcggcgactttaagattaaggaagcgaaggacccggaagcagagcttaagattgccggaggaagctggatctatgacggtaaagagcacaaagttaaactggacgtcatcgattccgttctggcagcgctgaagagatacaagatcgaatacagtacggacggaggaaatacctggtctgagactgtaccgggagtcaccaatgtagcagaaggaaccgtaactgtgactgcaagaggaatccgtgaaggttatgagaccctggtatccaacgagacaacgatccagatcacagccagaaccgcaacgatccgggtaaaggatgcagagaagttcttcgatgaaacggatccggcatttacaggaacagaagagaacctggtaaaagcaggggatctcggaacggtaacctacagaagaaccaacacagacgaagcggtgggaacgtatcagaaggtgctgacagctgagtatacgccaaacaccaactatcttgtaactgtcgtaaagggaaacttcgaaattaaaacagcctccatagaaggagcaaaggtcagcgctgtcggaggaagctggatctatgacggagcagcccatgcagcggaagcggccctggaacatgcatccggctacacggtatattacaaagccggtaatggagactggaccacagaggccccgagtgtgaccaatgtactggaaggaaccgtaacggtatccgtaaaggcgacgagaagcggctatgcagatttaatgacagacgatgtaaccttaaagattacaccgagggaagccacgattacagtggatcatgcagataagttctttgacgagcaggatccggattttaccggaacaacagcaaaccttgtcgcatcgggagatctgggaaccgtaacgtataagagaaccaacacagacgaggcagtcggaacgtatcagaaggtattgaccgcagaatatgagtcaaacagcaactacgttgtaattgtagaaaagggagactttaccattaagacggcaatcatagaagatgcggttctgacagcagccggaggaagctggatctatgacggaatggcccacgaagcaaaagcagagcttactaatgcacctggctatacgatctactataaggcaggaaacggcgactggagtacaacagctccgagtgtaaccaacgtggacgatggaaccgtaacggtatctgtgaaggcgacgagaaacggttatgaggatttagcagctgaagatgtgacgatcaccatcacagcaaggccggcaacgattgttgtagacaacaagtctaaatcttatagtgatattgacccgttatttaccggtcagattcagggattgattgccgacggagatttaggcagcgtggtttaccacagaattgatgcggataagaacaaagaggcggttggtgcagatattacattgactgcaagctaccgtgaaaattccaactataaggtagaagttataaacggcaagctgaacattactgcgttaaatactaacacggtgaatgtgacaggagagacagtaacttatgatggaaagacacatggactgagagaagtgacagcgctgaaggaaggttccaccattctttattcggtggataaccagaactttagtgagacagcacctgtatttacagaagcagggaatcatacagtctatgtaaaggctgtcaatccaaattatgatgacacggcagttgtaacaggtattgtagtcattcagaaacgagagataacaattacggcagccagtgcggaacggagatacaacggattagagttaaccgcaccgacagcggccattacgaacggaacgcttgcagacggccaggttctgggatcagtcaaagtgacaggttcacagacagcggttggcagcagccagaatgtagccagcgatgcagtgattgtggcgaatgatgaggaagttacagctaattatcacatcacttatctggcaggtactcttagagtaacgtcaggcagcagcggaggtgataacggcggcggaggcggagatactccgaatcctaataagccatacgttccgggaggtcctggaactgtaacgattgaaccgggcgaagtaccgttggcgaatttacctgagggcagcccggcagacaatttagttctgatcgatgatggcaacgtaccgcttgcaggtcttcctaagaccggcgaccgtgcaggagcgcatgcaggtctggcggcagtgctttccggattcctgatggcagcatttgcagtgctgagcagcaagaagaaagaagagaactaacgcccagaactaaaaaataagaagatataaaaggcggcggcctggcagataatcacttctgccaggccgccgccttctgtatccattcatttctgtttcactattttccggtcagcatctctacctgcgcaaccacctggctgatataagcgctcaaaggaagctcttcgcagcctaccacgtaatgattgcacttatttaccggtatcaggattttctttgcctggctggaaccgatggcttccgccatggccggcgtgatctcaccgagcagtgagttggggattacgatgccgatcgggccgataataatgtctgcgctccggctggccactaccacgggattttcaccggttgcaccggcgtcggcaccggctttcagcatggatgaggtagcgatggagtttgttccgatcgctgttatttcaagttccggatgggatttttttaactggacgataacggcatgtcccattttgccgccctgtccgtcaattacgataagtttcatttgtacattcctcttcactgtaagatttctttatcattataaagcattcccatcgggtttacaagaacggttacgcgagtcttctttccctgtttacggaatgacttaccttgtagtataattaaaactatcaatgcggaggtacataacagatccgcaatcacagaaacaggaggaagttatcatgtatgtagaaaacaaaaatgttccgcttacagacttaggcggcggtgtggtgcgaaaggttctggcatacagtgagaatttaatgaatgtggaactgaagtttgaaaaaggagccatcggcgccaaacacagccatcctcatgagcagatcggctatatcatctcgggttccctgttatttcaggaggagggaaaggaagataaagttctggtaacaggagacagctactatgtagagccgaatgcagtacatggcgtggtggcgttggaagacaccatgctgctggatatctttacaccgatgagaaaagattttgtggaataaggaatcaaaacaaaaaagaatcgtagaaaaagaattataaaaaagaagcccggaagtacatacatatctaccggacttctttttttcgtgcggcttccttatttctccttatgaggcagtctgccgcgcagaaagcgtttctttagtttgttccagttaaacggtatcagcggatagatatagctctttcccgcaatcgtcttattaaatatgaccgcgcagacggagaggatgactccgatggcaaagccccagtaattaaagacggcggtaaggaccagcaggatcattcgcatgaatttgaatgcatagcccagttcgaagctggcctgggaatagtttgcaacggtgacgaaggccatatagagcatggtttcgctgttgaaccagccggattttacggagtattcccccagaacgataccggcgatcacactgagcggtgtggtcagcatactgggcgtattgacggcggccagcctcagaccgtcgatggcaaactccagtatgagcagctgaaagataagcggcacatgaggcggttcagacaattgaatgaactccagccaggatgggatggcatccggattctgcatcagcagcagccacagcggcgttaaataaagtgtcagcacggagatggccatacgtgacagacgcagataggttcccgttaccggagggaaatagtaatcgtcggcctcctcgatgatatcgaagacagatgagggcagaatcatggcggcaggagagttatctaccagaataatgatgtttccctccaggattgaggcggccgcagtgtcagggcgttcggagaatttaaactttggaaatggattataccatttatgcggataaaggcattccgccaggctttcctggttcatggtcagcgcgtctacttccagtttattgatcctgtccttgatcatggccagaagcttttcatctatccggccctgcatgtagcagagggcgatatcggtgtgagaactctctccggcactggtaatctccatggtaagcttcggatcgcggatacggcggcggatcagggccgtgttgaaaataagagtttccacaaacccgtcacgggaaccgcgaagcaccttgtccttttccggttccgatacgccgcgggccggataggtgcggcagtcgatggtgaagcagcagtcatatccatcgataaacaggcatgacacacccatgagaagctggccgatcatctcagaatcactcctgaccagtccgacctctccatagggcaggtatttttttgaaaatgcgtgggcgtcttccggcatggcgtcttccttcagcgttgaaaatgcctgaagaatctttaaccatacctcgtctttggtgaagccatctataaaatagagacaggcctcccgcccacccacatggatgacccggtagacgacgtcgaaattcgtgtccacattcaatttttctttcagataagacatgttatcagaaagcttactggaaaagtccatatcatggtctcctttttactgtattggtagtccgcggattccgcggcaatggaagggaattggtgataaagaaagtatgcgcatttttggtgaaaatatgtttcatgaaaatgtgtacgcatgacaaagacgtttttgcatacattgtataaaaaattgcgataatgattcttccagtcccgtccttttttggtgaaatacactaaaatgattgactttttccagtattgatgttatgattgtccatgtgagaagcacaaaggggtgccttgcatgtatgatttcaggcatggggatgccagaattgtataaacttaataatgtgacggttttagatcgtgacgaaggactgctttctgtgggggataagcagtccttttttgtatcttaaaaacgtgctcctgtgacatcaaaaagccgttcggcagatttccttctgaacatgaaaaaaaccgccggaaccttataaaagaaaggttaccggcggtttcgccatggagacaacagggctcgaacctgcgaccttctacacgtcaagcagatgctctcccagctgagctatatctccataccgttattttaatcgataggggcaaaaaaatcaatagtaagaataaaattttttaagttgtcttaatttgtattgatggaagcgggaattttacatataatagcattagactgcttcagataagacaaggagaggagcttattacgatgtggaggaagttaaggaagaacaggcgttttcgaacagttatgacgacggtggcggttattggttccgcgctgcttcagacattcgtcattcaggcgttcataaggccggcagggctgctgtccggcggatttacgggaattgcgatcctgattgaccgggtgacctcactgttcggcgtcaatatatcgacttccctggccatggtgattttgaatattccggtggcctgggcctgcagcaggagcatcagccggcggtttacatttttttcactgctccaggtatttctggccagtatttttttgaagctctttcacttttctccgattttcgaggatgtgattttgaatgtgatttacggaggcgtactgtacggattctgtatcgtgctggctttaagaggcaatgcgtccacaggcggaacggacttcattgccctttacgtatccaataagaccgggaattccatctggagctatgtatttgccggaaacgtggtgcttctgtgcatctttggtgccattttcggctgggattacgcagggtactccattctgttccagtttgtgtccacgatgattgtgtctacgttccatcaccgctatgagcgggtgacgatgcagattaccacctccaaaggtccggagatcacgaacgcttacgtaaagaccttccggcacggcatatcctgtgtggatgccatcggaggctacagcaaaaaacacatgtacctgcttcataccgtggtgtcctcctacgaggtggaggatatcatcactctgcttcacgaggtggacgaccatgttatcgttaatatgttccggacccagcagttttacggcggtttttaccgtgccccgatggaatagggccaatcctgtttttaacggttccgtctgcggaatccataccagtggtattttttcagcttggaaaaccagttaaaataaaagaaaaacaggatagaagtgataacccatgtcagcgggtagctgaaaataacagtctgaatcgtcgggcgaagcggtaccgcggcccaaatccagacgacacgcagcgcacagacgcccaggcaggtgatgatcatgggaatccagcagtcaccgacgcctcgcagggagcctgaatagatctcgatgcagacgtaggtgaagaaggtcggaacgagatactgcaggatctcggttcctttttcgatcaccgccgcgtctgttgtgaacagcaggtaaatatagcttccgccgcagtacagcaggatgcttaacaggaaggtggcggcaaagctcatggccagacacacgtgtactcccttatgaaccctgtcctttttcccggcgccgtagttctgtcccacgaaggtggtgacggagataccaaaggcgttgatgatcatccagaatacactgtcgatcttgccgtaggcggtccaggctgcgatggtatcggttcccagcgcgttgacgctggactgtatgatgacattggaggcggagtacatgacagactgaagccctgcagggaagccgatctggataatccgcttcagcatgtccagatccagccggatggactttggaatcaggtggtacgattccttcgtcttcatcagtacgatgatcaccagcacggcgctgactaactgggagaggatggtggccagcgcggctcccataacgcccatgtgcaggcagacgacgaagacgatgtccaggataatattggtaaagcagctggcaatcaggaagtacagcggccgttttgagtccccgatcgcccgcaggataccggctcccatattatagatcaggttcccgatgactcccagaaaatagattctcatgtacaggaccgcatgatttaggatgtcgtccggagttcccatggcggataaggcccacggcgcgccggccacgccgatgaccatgagcacgatgcctccggcaatggaaaatgcgatcgacgtatggaccgcccggcttacccggtccggctgtttggcgccgtaaaactgggaaataattacggtggcgccggaagaaagccctacgaagaaccccacaagaagattgatcagggttcccgtaggacctcctacggccgccagtgcttccttcccaacgaagcgccctacaatcacggcatcagcggtgttgtagagctgctggaaaaacgttccgaataaaattggaaagaaaaacagaagaagctgtttccagattactccttctgtaatttgattctgccctatggcattctgtgtcctgcttttctgactcatatcccgttcctcttactgtaaaaaattatgtattctgatctcattatacaggcagaaaagagaaaacacaatccccataccatattcttattttgcagcttcagctttggacagcgccttgtcgactgcttttaagaggacggtggaggtgtagcgtgtctcatcggaataggagatgtttttggtggactggttctttacaatctgctccgagagtgtgtccatggccggctgcatcagcggatacatggtggtgactgcttcgcttagaggaacgagggtgaccgatgtaattttatccgcgtccacggttacttccacattgacatcctggttattcagcgtgattgccgaagagtaaactccgggtacataggcggccgcttctccggaagtgggaacggtatcttttttcggccggaacataataagaaacagtgtgattaacaggattccgaggccgacaaagatggcggtgtagatgatttctttcatccgcagtacaacaatttttgttttagagctcatataaaataaggtcctccgaacgggttttgatataatgtattctgcttgggggcggtttatgttatactattccttacagtgagaaaagacttgacagagaaggagcatcagaagagatatgtccatacagctgcttttaggcggttccggttccggaaagacgcaccgcctgtatactgatttaataaaggattccatggagaatccggatacaaagtattttgccattgtcccggagcagtttaccatgcagacgcagaaggagattgtgacgctgcatccgaaccacggggtgatgaatattgatattgtcagctttcagcgcctggcataccgtgttttcgaggagcttgccatcgtaaatccggatgttctggatgatatggggaaatccatgatattgagaaaggtgacggggggaaagcagaaggagctgccgctgtatcagtcgcatttgaaccagaacggcttcatcggtcagttaaagtccatgctttctgagctttaccagtatggaatcacgccggatatgctggaggcgaagattcccgagacgaccagccccatgcttcgccagaagctggaggatatctccgtgatatacaaggcgtttcaggagtatatcagggaccgctatattacgacggaggagattctggatgtgctttgcaggcatctgccggaatcaaagctgatcagggacagcgtgatcaccctggacggctataccggcttcacaccggtccagtaccgcctgctggatctttttctccgttacagcaggcgggtggtggtgaccgtgaccgtcgatccggccgtgccggagcggggaaaaagaggagtgcaggatttattttacatgagctgtgagatgattgataagttaaacgcgctggcccgtcagaatcacgtgaagcgggaaccggatatcgtactcgacgagcatccggccgtccggtaccgcaggggagcaaagaggcgggcggagcaggaggtgcgggtggagcaggaggcgctgacggtctatccatcttctttcgccctcgattttctggaacagaatctttaccgctacagcggccgcgtgtattccggcaaagcggaggagatccgcttggtgcaggctgtgaatccggcggaggagatctcctgtgtggtccgtgagatcggaaaaatgctgcgcgagggttaccggtaccgcgatatggcggtgatcaccggtgatatcggaagctttgcgggagagctgattcatcagtttgatgcttcggagatcccttactttctggatgataaaaagagtattctgaaaaaccccatggtcgagctggtgcgcgcggccctggagacgattcagaaggatttctcatacgaaaccatgttccgctacttaagaaccggcctcgtggtgaagccggaggaagagcgtaagctggaccggctggagaattacgtgatcgccatgggaatccggggacataagcggtggaacaccccctgggagggctggttccgcggcggcagggatttgaatttagaagagttaaaccagctccgggaagagattatggcgcctctcacggcctttatcgaagcattccgggaagagggcagaacggttcgcacgatgagcgaggctgcggtgcgtctgctggaagcgctttctgtggaagaaaagatgctggccagagagtccgcatttcaggaacagggagagtttggactctctaaggaatacggtcaggtgtacggcctcgtcgtcgatctgatggatcgtctcgccaggcttctgggggaggagaaggtgagccggagggagtatgcggagattctggacgcaggattttctgaaatcaaggtgggcctgattccggcggctgtagaccggatcgtggttggagatattaccagaactcgtctggatcatatcaagattctgttttttatcggggtgaatgacggaattgtaccgcagaagaaggaaaacagcagcctgtttaccgataaggagcgggaattcttaggcagccatcacatcgagctggctcccaccgtgcgggtggagagcttccggcagagattttatctgtatctcgccctgacgaagccggaggaacggctttacctttcttattcggccatggatgcgtcggggaagagcctgcggccgtctattttgctgggagaattaaaaaagctgtttccgcagctgactgccgtggccgcgtcggatgaagcagcggggataccgttttccataagagaggccagaggaaggctgacccgcgggctccggaattacgggatcagccgggaggattcggagtttctggaactgttccgccattttatgatgaatgaggagcagagggagagcgtggagaagctggtggatgcggcgttttatgcctatgaggagcgtggaatcggtaagatggcggcgaaggcgctgtacggcaccgtgctgggaggcagcgtcacgaggctggaacagtatgcgtcctgtgcctatgcccactttttaaattacggtctggaactggcggagcgtcagcagtatgagctggctgccatggatatcggcaatctgtttcacgattccatcgatctctgctttaagcggatgaaggaacagggaggggactggaagaccatcggagaagaggagcggaaggcgctggtgcatggtgtcgtgaccgaagtgacggaggaatacggcaatacgatattgaagagctctgccagaaacgcctggctggcccgcaaggtggagaaaatcacggaccgcaccatatgggcgctggcggaacagctgaagaaaggcgatttcacaccggtaggattcgaggtttccttctcggccgcggataacttaaaggcgatgaaaattcctctttcagaggcggaggccctgcatttgaaggggcgtatcgaccgtatggacttatgcgaggacgaggaacacatctatgtaaagattatcgattataaatccggcgggacttcctttgacttaaccgcactttattatggcctgcagcttcagctggtggtctatatggatgcggccctggagatggaggaacggcgcaatccggacaagacggtgattccggccggtatattctattataatatcaacgacccggtgattgagcgggaaggcgatatgtcgccggaagccatcgacaggcggattttaaaagaactgcgtatgaacggcctggtaaacagcgagctggaggtcatcagccatctggatcatgaaattgagacggagtccgatgtcattccggttgcgatgaaaaacggtctgattcaggaggcgaaatcgtctgtagcgggcggaaaccggttctctgctttaaagcgatatgtcaatgagaagctgaagactgagggacgcgaaatactggacggagtcgtggcggtgaatccgtacaagcagggaaataagacggcctgcgactactgtccgtaccatgcggtgtgcggtttcgatttaaagacttccggttttggattccggaaattcaaaccactgaaatcagaagaaatatggccggtcatagaaggagagcagcaggatggcaattaactggacaaaagaacagaaagcggttattgaaagcagaaaccgcaatcttctcgtttccgctgcggcgggcagcggaaagacggcagttttagtggagcggatcatccgcatgataacagaggggaagacccccctggacattgatcagcttctcgtcatgacctttacgaaggcggcggcggacgagatgagggagcgtgtgcttctggccgtcgatgaaaaactgaaggaggaccctgaaaacagccatctgcagatgcaggcagccatgataccgtatgcgcggattaccaccatcgacagcttctgcctgggaattatcagggagcactataaccgtctggatatcgatcccgccttccgcgtgggagatgagggagaacttcttctgctccgcggttccgtgatggagcagatgctggaggactattacgaggccggggacgaggaattttcacggtttgtggagacgtatgccacaggcaaatcggaccggggcatcgaggatcatatcatggccgtctacaatttttccggcagtaatccatggccggaggaatggcttacggcctgtgaaacggagctggagaactgtgaggaagaacggctcatggagacggagtggatgcattttctgatgtgggatgtcgcaatgcagaccggggaactgtgcgcccagctggaggaggcggttaccgtctgtgaagaggaaaacggccctgcggcctatattcccatgctgacatcagatttacgcatgctgcgggagattggaaaggcggaagattacgccagtcttaacgaactgttaggctgcgcagccttcgaccgtctggcctctgtccggagtaaggatattgacgcggacaagaaggcgtttgtgacgggctgcagggaccgggtaaagaaggcggtcggaaagctccgtgatttgtactgctttgaatccatggaaaccgtggtgcgcgatatgaggggaaccgcgggcgcggtgcggatgctcttaaagctggccggagaatttaacgaccggtaccaggcggcgaagcaggaaaagaacctggtggatttcggggatctggagcattacgcgctggaggtgcttctggagaagccggacggagagtcagaggaatgtgcgggagattctatggatgattccctggatgcgagcggacgaaggccctcggcggtggccgatgaattgagccgccagtttgaagaaatcctggtggacgagtatcaggacagcaacgacgtgcaggagacgctgattcacgccatctccagggagcggttcggaacccccaacgtgtttatggtgggggacgtcaagcagagcatctataaattccgcctggccaggccggaactgtttttaaagaagtatgagtcttatccaagggaagaaggattataccagacgatcgagctgcatcagaatttccggagccgggacagcgtcctttccggcatcaatgaggttttctatcagattatgacaaagggtctgggcggaatcctctatacggaagacgcggcgctccatcccggagcggtatttgagcccacggaagagacggtgggaggaaaactggagcttcacctggtaaatacaggagggatccagctcaaacagctggaaacggaaagtgatgccttagattacacatcccgcgagatggaggccaggctcatcgtcagccgaatgaaggaactggtaaatcctgagaccgggttaaagatatgggataaaaaggagaagcgctacaggaccgcctgttacggcgatatggtaatccttctgcgcagcttaagcggatttgcggaagatttcgtcaatatcttaatgaacgagggaataccggcctatgcggagcggagaacaggctattttaccgcgatcgaggtggaaacggtgctgtgcttcttaagcgtcatcgataatccgatgcaggatattccgctggcagcagtccttaagtcccccatggtgggcgcctcagacgaggatctggcccgtctcatggctgttttcaagagaaccgcgaaaaagggccaggacaggggaatctatggggcgtggctgtattatctggaaaactgcccggaggaagagcgggaagaagggctgtacagaaagctggcgctgtttttcgatgaattggcggagtaccggcgtatggccggatacttatccatccatgagcttttgtatgtcatttatgagaataccggatattacgattatgtcgcagccatgcctgccggagatgcaaggcaggcgaacctggatatgctggtggaaaaggcgtcagcctatgaaaagaccagctactcgggactgtttcattttatccgctatatcgagaagttaaagaaatacgacacggatttcggagaggccgctctggccggagacgggaatacggtccgcatcctgagtatccataagagcaaaggactggaatttccgattgtatttctggctggtatggggaagaaatttaataagcaggatttgtacggtaagatcctgattgatccggatctgggaatcgctacggattatctggatctggatctgcgggtaaagacatcgacgctaaaaaagaacgtactccggcggcgcctggagctggaagcgctgggagaagaactgcgcgtcctgtacgtggccatgaccagggcaaaggaaaaactgattatgacgggaacggaccgttatctcgataaaaagctggagcgattctccgatattaagagaacagccggccagattccatttacgattctgtccacggcggattcgtttctggactggctgcttatgagtctttccggtaagctgtcggagtcagcccttctgtcggaagcaggcgtggaaaccggcctcatgaccgtgcgggaatattccgtggctgacctggttggtgtggaaatcgaacatcaggcggagaaaaagctgtcaaaggaggaactgctgaacttcgactgcagccgtatttatgatgaagcgtatgccgcaggaatttccgcagcattttcctaccattatccgcataccgcagacatcggccttcatacgaagctttccgtatcagaacttaagaagcagggacagatggtcgatgaggaggagagtacgtttctgcctacgattccggctttcctgatggaagagaacgggaaaaaggagcagggaggaggagccttccgcggtaccgcctatcaccgggcgctggagctgctggaattccccgccatgaagactttagccgatgtggagacggctctggagacatttcacagagagaaatacatggacgaagagagtctggctcttctggatgcagggattatctggaacttcttaagctcccctctgggcaggcgcatgagtgccgcacagtccaaaggtcttctttacaaggagcagcagtttgtcatcggaattccggcccgcgagatggaggtttgcgattccggtgaactcgtcctgatccagggaatcattgacgcgtacatggaagagggggacggcctcgttctgatcgactataagaccgatcacgtggtgaaaggccatgaatcgctgctgaccgagcggtatggaattcagctggagtactataagcgggcgctggaacagatgacggggaaacgggtgctggagaaaataatatattcgctgacgctgcaggaggagattgtgatagagtaagggatggtttagggcatttctctaaaagaaaaaattagagtaatgcccttttttgcttctacgtttttttgcggcgggcagcaaagtggttacttatactcactgctctttgaaaaacgggataccatctgatccatactgatacaaaccaatttttcttctgcctcgagctgaaggacctgctccgtaaaaccgctttgggaaaaaagataaaaggaacattcggtatctcctgtattttcccatttggatttcagggttttataatctctcagatcgaagggagaggctttatacttgcattccccgagaagatagtgtttgctttgatgatccacggccataatatcaatttcggtttcatatgttctgcgggatttatgtccatttccgccatctgtaagctttgtgatttttccccaccatcggccgatctttgtgtatcggtatggtaattgttcctgcctgttcagcaggcgaatataatcacggcacaggctttcgaacacgaaggccgtgaattcgtgtaattgaggggttaccacatatttcattacaccttccgtatctccggcttctaagtctgagtacgtagtgaagacgaaggaataccagaaacggaagaagttatctgtcagctgataaagtcctttgtttgattttgcacgttcctttacactgtcagaaaccgagaactcccgtatgactatctggagatccattagattttttaagtatacagcaagttttgatttttcgatttgagttttgttgaaaatatcatttaaagtggtgtttcctaatgcaatggcttcaataatagtattataaacggcagtttctctgagttcctgccgcaataaaaattctacttcactgtataatacggatccttttgttaatatatttttcctgatattctcttccacactgatacgatggtcaaattgttttaaatagtgaggaattcctcctaaaattgcgtagaccgttatctggtcctcaggcggataatcaggaaagaattttataacatcagaaaacggcatttctgtcattttgtagatacctgtagcacgtccatagaggggatttttttccgccagtatctccttttcgataaaactcattgcactgccacatagaataatcatgatatcagcattttttagagatgaatcccacagattttgaagaatagaggggatgctcccatttgctctgcacatatagggaaactcatcgatcacaagcagttttttaccgtttccagggagctctaagctgcttgtaatggccgattcccagtcctgaaattcgtgtatatattgtgctgccggaatccctgcttttaatactttttctgaataagaaagtaattgctgccggtctgtacattcgcggcaggaataaaagatatggggtttccctttacagaattcttttaatgtttcggtttttccaacgcggcgccgtccgtatagaacgatcagttgtccttctttacttttatatttttcttctaaaaaagataattccattttgcgtcctataaacattttgaaccttctttctaatcgtgattattctaatcatgattatattttaccctgttttatgtaaaatatcaactgtatacgatacaattttctacctaaaaactatttagcattgctaaaatatttttatgtgatacaatgataatagataatatctataaataaaggacgaaggacgtcaatctgaaagcaaacgatttagcaggagggcgatatggatataaactatcatgaaattgcggaaagggccgcttcccatgcgttaaagagcaatattacacttgattattcagaaaaaagcattgcggaagttgagtcaatcttaggagcgtattatgaccatcttgcagagtatgacgggaaggatggagcagatacgctgtggaatgtggcagttcactatggcatttatctgggtgaaaccatgctgcgcctcgggatgaaggaaaagggatttgcctggtacatagacgacggcatgccggttctgaaaaatcaggcgaaagctcagatttctcccgtcacaaaggctcacaagcgaattttaaatggaccggaggacaatgtaaagagcttctgcgatgtggcttttctgcttgcagacgggaagttcccggataaaaacgttcatcgggcgatcaatgtgcagctgccctccggtcaggtgatagaaaatgtgttataccgggatatcgcttcttacattacgatgattgaaacgggcagggaggattttctgatcctggaatcccaggacggcttctttcagttttacggtgtgaacaaccaattcgtctgcgaggtacgcgtaaatctgccggatggcgactttcatacctactctgtcattgataaggctaaagagcagcagacccggcgggtccagcttaccacgccttatggacagtttacacctgcagagcgggaggtggtgtctctggaagtggtgaacatggttgtccgggcatactatgaacatgtgaagacagacgactttcttggagcgattccatatattgataccacggagataacgaagcggtgtatggggctttaaatctatgaataaaggagcagagaaatcatgataccagacaacgaagtaaggctgacacaaatgacaaagacagcaggatgtgctgcaaagattggtccggggactctggcaggagttctggaaaaccttccaagagccgatgatccgaacctgatggtcggaatcgagacctctgacgatggagctgtataccgggtgaatgacgagctggcgcttatacagacgctggatttcttcacaccggtggtggacgacccttataccttcggccaggtggctgctgccaacgcattgagcgatatctatgccatgggcggagaaccgaaggtggcgcttaacattgtggcgtggccaaactgcgtcaatccggcatttctcggtaagatactggagggcggcgcttcgaaggtcgcggaagcgggagctgtcctggcaggaggacattccgtccaggatgatgaaccaaagtacggcttaagtgtgacggggtttgttcatccggacaagatttttaaaaactgcggtgcaagaccgggagacgtactgattctgacgaaaccgctgggaaccggcatcgtgaatacggcggtgaaggctgatatggcttctgcggaggcgaaagaggaggtgatccgggttatgacctctttaaacaggacggccaagcgtgtgatcgagcagtttgacgtacacagctgtaccgacgtgaccggatttggtctggcaggacacagtgccgagatggctgagggcagcggtgtgacactggaaatccatatgtcgcagctgccgattcaaaaggaggctccggatctggcaaagatggggctcattccggcgggagcatacagaaaccgtgcgtttgttgagcataaggtggactttggggacacggaggaattcctgtgtgatatcttctgcgatccacagacatccggaggacttttagtcagcgtgacaccggaggatggggaaaagatcgcggccgggcttcgggaagccggtctggagaccgcatttgcagtaatcggatgtgtgaaagagctggaagataaatttgtgaagctgaggtgagtgtatgatctatctcgataatgcggccacctcgtaccgaaaaccggaggcggtataccaggcggtcttagaggccatgcgccatatgggtaactccggcagaggggcccatggcgcgtctttggatgcctccaggcagatttatgctgccagagaactgctggcggagctgtttcatgcgggagatccctccagagtggcgttcacggccaactccacggaaagcctgaatatggcgctcttcggtctctttggaccgggtgaccacgtaatcaccacaatgctggagcacaattctgttctgcggccgttatatgcgttggaagaggcagggatggaactgacggttcttcccgccgatcaaaaaggctgtatctgttacggggatttcgaaaaagcgctcagacccaatacaaaggggatcgtctctacccatgcctctaatttgaccggaaatatggtggatatcgggtggattggacgcttctgcagagaaaaaaacctcctttatgtcgtggatgcctctcagaccgcaggcgtgttcgacattaatatggaagaaatgaagatagatgttctctgcttcaccggacacaaaggtcttctgggaccccaggggacgggaggaatctgtgtgcgcgagggcattgccgtgaggcctctcatcgtgggcggaagcggcgtccacagctactcaaagtcccatccggcggatatgccggcggctttggaggcgggaactctaaatggtcatggaattgcaggactttatgcggccttgtgctacatccgggaaacgggcatggatcagatccgggaaagagagctttctcttatgaggcagttttacgacggggtgagagcgattccaggggtgaccgtatacggtgatttctccggcctgcgggctccgatcgtatcgctgaatatcagggattacgattccggcgaggtggcggatgaactggcataccgctatgagatctgcacccgggcgggcgctcactgcgctccgctgatgcaccgggctctggggacggagagtaccggagccgtccgtttttccatgtcccactttaatacggaagcagagatcgatgaggctgtccgcgcggtgagcgggattgcggcggaatagcaggctgcttttgacagggggaaatacttatgaatctgaaacaactggaggcctttgtctgtgtggcagaggtgaaaagcttttctcaggccgctaaaaaactgtatctgacccagcctacggtcagcgcccatatccattcgctggaaaaggagctgggcgccaggctgtttatccggacgacgaaggacgtggaattatccccggccggagaactgctgtacggcaacgccaggaagatgctgcagctggaaaagaatattctccgcgattttacgagagcggatacgccgggaattcaaaagattacggtgggcgcttccactgttccggggcagtatattcttcctcagatcctctctctgttttccaggacgtatccggggaaccagctggaactgatggaggcggacagcctggaggtcgtccgcatggttctggatggaaaggtggagatcggctttaccggcacacgtctggaggatccgacctgcgtatttgaaccgttttactatgaccgcctcgtggtgatcacgcccaatgcagaggcataccgggaatacgagaagaccggctttccgatagaacgcttctatgaggaaaaatggattatccgggaggaagggtccgggacgcggaaggaaacggaacggtatttaaaggagcacggcgtggacttgaggcgcatgaatgtggtggcgaccatcagcaatcaggagaccatcaaaaagtcagtcagcaccgccatgggaatcgccatgatctccagcgcagcggtggaagactatgtggcttccggccagcttctccgttttccgctggcggagggcgacatttaccggaaactttacatggtctggagcaagagcaataagcccggtaaagccgccaggctgttcatacagtttgtgagggaactgtatgcttacttatagataaaagctataagtataatgcgattatcaattagacaggtgtccctttctttgctacactgaattcataaatttttccatttatgaaaagggggacaacatgaatttgacggaatcgaaaaaaacactggcgctatcgggggtaatgctggggatcacggcggcggcgctggccttcttcggaaacccgaagaacatggcgatctgtatcgcctgctttatccgtgatacagcgggagccatgaaattacaccaggcggcggtggtacagtatgtgcggcctgagattgccggaattgtggccggggcgttcttaatctctctgattacaaaagaataccgctccacggcaggctcttcaccgatgatacggtttgtgctggggatgatcatgatgaccggcgcccttgtatttctgggctgtccgctgcgtatgctgatccgtatgtcggcaggcgatttgaacgcctatgtggcgctggctggctttgtgggcggtgtttttaccggaacagctgcactaaagaggggcttcagcctgggaagatcgtatgaatcacgaagcgccagcggatatgttctgcctgttcttctggttctcatactgatcttgagcgtgacgacgagcctgatggcggtcagcgagaaggggccgggaagcatgcacgcgcctgtactcatcgcacttgtgggcggactggtattcggagccgtctcacagaaatgcaggacctgctttgccggaagcttccgtgatgtgatattaatgaaaaactttgatttaataacaattatcggagcatttttcgcagtgatgcttctgtttaacatggtaaccggaggctttaagctttccttcgacggtcagccggtagcccatgcacagcatttgtggaatatactcggtatgtatgtggttggatttgcagccgtgcttgcaggcggatgtccgctcaggcagctggtgctggcgggacagggctcttccgattccgctgtcaccttcctgggaatgttcatcggagcggctctctgccataacttcggacttgccggagcggcagcagcggcagcgacggacacctcgccggcggcagcaggaggaccgggaacggccggaaaagccgcggttatcatctgtattgcggtgctgtttgccattggctttctgccgggaattcagcgagagaaaaaatagaagaacagagatcaggaggaaccccacatgtatgaggtagacgcaagaggcttatcgtgccccgaaccgttaatgctggtatcggaagcgcttaaattccacccgggagagcagataaaggttctggtgagcgagccgcattccagaacgaatgtagaaaagtttgtgaagaacagaggacttaccgtactggtaaaagagactggttcggagtttgaactgacgatagaaggacagagatagatgaggcagaaagaaaataaagtgatcgtgacgttccatacaacggcggaagcgatcgcgatggagaaagcctgtttaaacggcaaaattccgggccgtctgattccggttccgcgccagatttcttccggatgcggtttggcctactgtgccgctgcagagctggaaaagatggttttaacgtatatggaggaacacgggctgcattatgaggcggttggcgtgtatctgatttgattcagggatagaaaaggcggtcagaattccggccgccttttctgatgcggccggcgcggaagaaagcctgataaatttttagacttatagaaaataactataagtgctctgcctgaattgtattcaaaatatccttctaaaggacggaaataaagaaaaatgcacaaaaatgaaaatagtattgacaaatagttgtacaatatggtagactcaaactgtcagaggtcagaaaatttaatagagataagtattcaacaaaacttatatatgctcataattggttgagcgtttctaccaactaccgtaatagttgtctataagtttttgcatgactgtcagcacgatcagtaaagactgcataagacaccagtcatgtgaaaattataggggtgacggtggtttttttttgaaatggaagtcgtccggacgcggtttttagctgtctctcctataacaggaatacggaataggagggaaaatgaccggagataagaattttgtactgaagggaaacatctgctacagtgaagatgcgaagaacttaaaactggtggaggcaggatggcttgtctgtaaggaagggctgtgtgccggagttttcgagacgctgccggaggaatatgcatcgtatccggtaaccgactgcggcgatcagatcatcacaccggggcttgtggatttacatgtccatgcaccgcagtacgcgttccgcggcctgggaatggatttagagcttctggactggctgaataccaacacgtttccggaggaatccaagtaccgggatttagagtacgcgaagagcgcctatggaatttttgctgatgccatgaagaacagcgcgaccacgagagcctgtatattcgccaccatccataatcaggcgacggagcttctcatggatctgatggaggaaaccggattaaagaccatgatcggcaaggtcaacatggaccggaactcaccggagtatctgtgtgaagagagcgcggagcagtccgcagccgatacggtgaagtggctggaggacacggcgggaaagtacgagaacgtccgtccgattctgacgccgcgttttataccgtcctgtacggatgacctgatgagaaagttaaaagagattcagaagaagtatgaccttccggttcagtctcatttatctgagaatcagggtgagattgcatgggtacaggaactctgtccagaatcacgcttctacggcgatgcctacgatcagtttggcctgttcggaggcggtgtaaagacaattatggctcactgcgtatcctcgacagaggcggagattgagttaatgagggaacggggcgtatacgtcgcccactgcccggaatccaatacaaatctgtcatccggtgtagcgccggtgagagaatatctggaccggggagttcacacggggctgggctctgacgtggccggcggcagcagggaatccattttctatgccatggcccatgcgatacaggtgtcaaagctgagatggagacttcaggataccggcttaaagccgcttaccgtggaagaggccttctatctgggaaccctgggcggaggctcattctttggaaaggtcggaagtttcatggaaggctacgaatttgatgcgttgatccttgatgacagtgcaattcgccatccacagccgcttactttaaaagagaggctggagcgttttatctatctgtccgatgagaggcacataaaaggaaagatcgtagcgggaaaacggattttttgatataatgaataaaaatggattgaattacaactgaatattgaaattcaaatagttccatatacgaaagaaaccaatatataatgagctgcgtggggctgctctgttatataaacgaaaatcattcaactatcaaggaggtaggaagtatggaaacgaagggaaacgagaactttttagagaaaatgttccatttgtcagcgaaccacacggatgtcaagactgaagtagtagccggtatcaccacttttatgaccatggcttacatactcgcagtcaacccgagcattttaagtgcggcaggcatggacagcggagccgtatttacggcaacagcactggcggcgctggtagcgacactgttaatggcagtatttgcaaactatccttttgtacttgcacctggtatgggattaaatgcatacttcgcatacacggttgttttaaacatgggctacacctgggagatggcactggcggccgtattcgtagaaggtctcatctttatccttctgtctctcaccaatgtgcgtgaagcgatcttcaatgcgatcccgatgaacttaaaacacgcggtatccgttggtatcggtctgtttatcgcatttatcggccttcagaacgcgaaaatcgttgtggacggtgcaacacttgtttctgtttactcctttaagggtgctttaagtgatggaaccttcaattccgtaggaattactgttttattagcgatcatcggtattctgatcaccgcgattttagttgttaagaatgtaaagggcaatatcttatggggaatcctggcaacctggatcctcggaatgatctgccaggcggttggcttatatcagccgaacccggaactcggcatgtacagtgtattcccggatttatcctccggttttggaatcaagagcatggctccaaccttcttcaaggtagatttctccagggtactgtcgcttgactttgtggttgtcatgtttgcattcctgtttgtagatatgtttgatacgttaggaacgctgattggtgttgcttccaaggccgacatgcttgataaagacggaaagcttccgcgcatcaagggcgctttgatggcagacgccgtcggtacatcggtaggtgcgttattcggtacctccacaaccactaccttcgtagagagcgcttccggcgtatccgaaggcggcagaacaggtttaacggcagtggtagcagccattttattcggcttatccttattcctgtccccgattttcttagccattccgtccttcgcgacggctccggctctggtagtagtaggcttcttaatgcttacgtccattaccaagatcgacttcaacgattttaccgaagcgattccgtgctacatcgcaatcatcgcaatgccgtttatgtacagcatttctgaaggtattgccatgggcgttatctcctatgtagtaatcaacctggtgacaggccatgcaaaggagaagaagatcagtacgctgatgtatgttctggcggtactgtttgtactaaaatatatattgatttaataatatatagagcaactgaaaatagcagcctgagcaaatcaggagaaccggtcatgtagacactgtcaaacggctggcggcgacatcactttgatggacgaaattgtcctgaaaaagtctcgtcgctgccagcctttcttattttttaagaacaggaaacagccggaagcctgattagcaggagaataaaagaaacaggaggtaggataccatgggagttggtaataacatggtccgcgttgacgccatcgagaaagtgaccggcggcgctaaatatacagcggatttggaacccaaaggacttcttgtggctaaggtcgtaagaagcacaattgccaatggtgtagtaaaaagctttgacttggaggaggcgctggctgtaccgggagtcgttaagatcgtcacgtgttttgacgttccggatatccagtttccgacgccgggccatccctggtctgtggagaccgcacatcaggatattgcggacagaaagctgttaaacaccagagtacgcgtctacggcgacgatatcgcggcagtcattgccgaggatgagatcgcggcaaaccgcgcggcgcgtctggtaaaggcagagtatgaggagtacgagcccatgctcaccgtcgaggcagccatggccgagggcgccacggtgctccatgaggagaagccgggcaacgtgatcgcacattccagctttgtcgtaggggaaggaacctataaggaggcggtggaaggcgaggacgtggtggagattgatcacgtctatgagacgcagagcgttcagcactgccatatcgagactccgatttcctttgcctacatggaaaaaggcagaattgtggtgacgacatcgacgcagattcctcatatcgtacggcgtgtcatcagccaggcgctgggaatcccggccggtgaaatccgcgtgatcaagccttatatcggcggcggattcggcaacaagcaggacgttctgtacgaaccgttaaatgcgttcctctgcacccaggtgggcggaaggggcgtccgtatggagatttccagggaagagactctggcctgcacgagagtgcgccatgccattaaatgccatgtgaaggcggctgtcaaaaaggacggcacgctggtggcgagaaaatttgaggcgtattccaaccagggcggttacgcgtcccatgcccatgcgattgtggcaaacacatccaatgagtttaagcagatttatcacgatgagaaaacactggaatccgacgcatataccgtctatacaaacattaccacgggcggcgccatgagaggatacggaattccgcaggcggcatttgcggcggaatgtatggcggatgacctggccgcggccattcatatggacccgctggaattcagaatgaaaaactgtatgccggagggctatgtagatcctcatacccacgttgcatgtaatacatacggcttaaaggaatgtatggaaaagggccggaactatattcactgggatgaaaaacggaaagagtatgagaatcagaccggtcctgtcagaaaaggaattggcatggcgatcttctgttataagacaggcgtttacccgatctctctggagactgcttcctgccgtatgattctgaaccaggacggctccatgcagctgcagatgggcgctacggagatcggccagggcgcggataccgtatttacccagatggcggcggagacaaccggaattacggaggacagagttcacatcctttccacccaggatacggatatcacaccgtttgatacgggcgcttacgcatcccggcagacgtatgtcagcggtatggccgtgaagaaggccggactcattttcaaggacaaaattctggattatgcggcatacatgctggataaagagaaggactccatggatatccgtaataacgtggtagtcgataaagaaagcggagaaaagcttctcgatatggcggagcttgcgacgacggcgttctacagcctcgaccgttccatccacatcacggcggaggcgaccagccactgcaaggacaatacctttgcaacaggcgcctgttttgcagaagtggaagtggatatgccgctcggcaaggtgaaggtgactaacattgtcaatgttcacgacagcggcacgctgattaatccgaagctggctgaggcgcaggtacacggcggcatgagcatgggactcggatacgcgctcagtgaagaacttctctttgataagaacggcaggccgttaaatgacaacctgctggactacaaactgcctacctccatggacacgccggatctccatgtacaatttgtggaactggacgatccgacgggtccatttggaaataaagcgttaggggagccgccggccattccggtcgcaccggccatccggaacgcagtgttaaatgcaactggtatagcggtagattccctgcctcttgacccgcagaagcttgtggctcattttaaggcagcggaactgatatagaagggacggtgataatccatgtatgatattgaaaaattataccaggcaaaagatataggggatgcgatccgtgccttgaaggaagacccggaggccgtcgtcatttccggcggcagcgacgtgctcattaagatcagggagggcaggcttgccggatgttccctggtcagcattcacggaatcaaagagctggaaggcgtgagaatggaagaggacggcaccatcgttatcggtccggcgactacattttcccacgtgaccaataacaggatcattcagaagtatatcccgattttaggggacgccgtggatcaggcaggcggaccgcagctgcgcaacatcggtacggtgggcggcaatgtctgcaacggtgtgaccagtgcggacagcgcatcgtcactctgctgcctcgacgccattctggtggtggaaggaccggagggagtgcgagagataccgatccgcgagtggtataccggtccgggaaagacggttcggaagcatgatgagatcctgacggcgattaagattaaaaaagaatcgtatgaaggatttggcggccattacatcaagtacggcaagagaaacgccatggagatcgctaccatgggctgtgcggtcacggtaaaactgaccggagataagaaacacatcgaagaaatacacatcggctacggtgtcgccgctccgacccccatccgctgttttaaggcagaggaaaaggtaaaaggcatggaaatcggaaacgagctgtttgagacactgggcaagagtgttctggaggaagtaaatccgcgtaccagctggagagcttccaaggaattccgtttacagctcatcgaagagatggcaaaacgtgccctgaaacaggcgattataaatgcagggggtgagtgcaatgcttaagattgttcatatgattgtcaacgataaagaggttgaggtggcagtagacgacagggaatccttactggagacgctgagaaaccgtctgggccttaccagcgtgaaaaaaggctgtgaggttggagagtgcggcgcctgtactgtcctggtggacggcgaggccatcgacagctgtatctacttaaccatgtgggcggaaggccgccggatcatgacggtagagggcttaaaaggtcctaacggcgaactgagtccgattcaaaaggcatttgtggaggaagcggctgttcagtgcggcttctgtacaccgggcctgattatgaccgcagtggagatcgtgggaaccggcaaacggtacaaccgcgaggaactgaggaagatgatatccggtcatctctgccggtgcacgggatatgagaatatcttaaacgccatggagagaatcgtggaagagacctataaggtcgttggaaaagaggattaaagggagaagcggaaaacttttggttaaacgtgtttcatagagagcaaaaagccggagccgggacatttgggagagtgtcccggctccggctttttggcgtcacagctgccgcatcaattcccctacaggaagcgattcacggcggaccccgagggagaggaccgctgaaagaagttcatagacagcgtcgatatctgattttccgagctcggccttctggtatttgaaatagaagtcaagcccctgatcgcgtgaggtctgcatgacggttaagtagagcttctggatatccgccctgtttgagaaccattcggttctcagcgggatgtgattcagccacgggttggaggaggagaggggaagcggctgataagtcagtgcggctccctcgtaggtggtgagcggcggcatggaaaaggtatcggcaaagagcctgtttaccgtttccggatccatattgctgtggcggtaaatgctgttttgacaggaggtgatctgccggattccgcttagaaaaggcgtgtcgggggagatcacggtgcggcaggggtaacagtgaatccggcagcctccgcaggtgcggctctgccttgaagtgcggcgtgatatgtagttgcggatggtgacatccctttcctccccattagtgaaggacagagcggtgcgcatggacatgagaaacagattcgtcatggacaccgaatgttcccggcaaaaggactgcaggcgggctgtttcctttttggacagggtaaaacgcgccatatcgccctccataggctgtatgacccggtcagccgcccgcaggccaggcatgccgtggcggagacggctctgctccagtgtccgggaaccgccaaaatcggtatagacgggctctcccgtcgtcagcagctgcttccagaaggcgagatccttctcctgtctcagggaatcctgttcccgttttaaatcggactgcaggacttcttcataacgcgcgggcatggccgggacaggggctccgtaaagatagtggcagtacagccggaaggtatcgttcatcatggaaatcagccctgcggaatccatgatgcggtggtcgatgcagaggtagacaccgttaaagccgccgggaagggataccatgacatagcggtggagaggggcgtctgccttctcgaagccaatggtgctccaggaggccatcaggtctttgatctccgctttggttttatccttcagattccggtatgtgatatcgggagtgtgttcaggaacgatgtactggcggattccgccttccctgtcaggggatgtaagctgaacccgcagacagtcgagacgttcagtctcttccgtcagacatgcctttaacagagaaaaatccaccggcatgcgtatggaaacacacacgccgatggtaaggacctgagtcgtgccgaattcttcgcaagcgttctgaagcatacgctgggaagccgtaaggggatagagatggtatgccatggagtcacacagcctttcttatgatgcataggtgttacagtatatgtgcaatggggaaggcaaataccatctttgttcagcagtcctttctctattggattgggccgcaggatccccgcatcaccagctgggaatgcaggagaatggtgccgatcggtacgtcatttaagaggctgtcgagagcgtagtatccgcatttgcccagctttgggcggtcctggcggatggtggtgagagggggatcggtgtaagggctgatcgggaggtcgtcaaagccgatgatacttaactcctccggaactcgctttcccagctccttaagctggactaaagcagcgttggccagctggtcgtggctgcatacaatcgcggttacgccgcggtctaagagccgcggcaggtgcttctggatacattcggagatgtaataggagcttccggagagctgcgggtccgaggaaaggccgttttgtttaagcgctccatagaaggccctgtgacggagcagaaagacctgggagcccagagcgccgcttaagtagccgatctttttgtggcccaggctttttaagtattccaccgccagctccatcccttcattattatcgacgcctacgctggcgacggccggattgcccttgatgtcattgtcaaagagtaccgccggggtgtggctcgtccggaaatctttcatccaggcatcgtttaaggaaatgccgagaacgaaggaaccaatgtagtcgttctccagcatgaatacgtcgtatggggtggatttctgcagcttgtcggtgaaggggacgacatccacggtcaggccggccggctccgccatcttgcggaagccgatgatcaaatcgtagccgaaatggccgggcgaggtgtattccatgtttccctcgccgatcaggacacacactttttttgaaacacttcgtctgcgtctcattttcgtgtatcccatctcgacagctgtctctaaaattgtttttcgtaatgtttcgctgatatccggggcatcgtttaaggccttggacaccgtacctttggaaattcccagtttatcagcaatatctgttatggttgccatttttcttctccagtcgtatcgatcgttacgtttcgaaataagcggctgcatggcggaacgccgttgcagctgactttcttattatagtaaaaatagtgagaaaaagcaataaaatggcagcaaataaaataaaaaatttcgacttgtttcgtatgcggcgaaaaaataatgaattataccatggtgatacaatggaaaaacggaaatatctaacagaaaaatttggaaaaaataacgaaaaacgggttgacgaacagaaaaagaaggagtatgatacaactatacgaaacataacgaaacttttatggagaaatcaggaggaagaatgcaatgaagagagggttggttttagctctggctctggctctggctgtgacggcggctgcgggaaggcggcttcggggcagggaagcggggaggaagtccggctgatggtctggtccccttcggaggatcagtcgaaggacagcggccagtggctgcaaaaaagctgcgagcgctttgccgaactgcatccggaatggaatattacgtttgtgtatggtgtggcggacgaggcgacggcggcgaatcaggtctcccaggacgcggaggccagcgcggatgtgttcctctatgccaatgatacgctgacgatcatgacggacgccaacgccctggtgaagttcggaggaaagtaccgggaggagatcgaggcgatgaactctgcggaggtcatcaattccgtgaccatggacggcgagctttacggagtcccgtttacgaccaacacctggtatatgtactatgacaagagcgtattttcggaggaagacattaagaatctcgatacgatgctttccaagggcacggtttcatttccatttacaaactcctggtatctgcctgcattttatataggaaacggatgtactctgttcggagacggaacagacgagtcaaagggggtggacttcggaggggagaaggccgttgaagttacagaatatctggttgatttaatcgcgaatccgaattttgtcgtggatgccgacggttcagggatggcagggctccgtgacgggagtatccatgcgctcttctccggttcctgggatatggcgtcggtgaaggaaattcttggcggcaatatgggagtagcggcactccccacctacacgttaaacggtgaggagaagcagatgaagtcctatgccggttccaaggccgtaggcgtgaatcctgaatcttcctatatggtgccggccgtccagctggccgtttatttaggatcggcggaggcccagaagcttcactacgaactgagaaacgtggtaccgtgtaatctggagctgatggagaatccggacatcgcgtcggacgcgctggttacagcccagaacgacacattcaaccgcacgtcaattcttcagccgtttgtggcaggcatgaataactgctgggtgcctgtggagaacatgggaaaagggatccggaacaggagcgtgacccatgagaatgcgaaggaacagacggaagccatgaatgctgcgatgaacagcaacggaatctaagggggacagggaaatgggaaagttaaatagaatcaatgagtttacaacgccgtattccttccgggaggcgctgcgccgcggaggcctggagacgaagctttccatgattttggcggggctggggaatatcgtacataaacaggttgggaagggccttctgtttctggcagctgaggctgcctatgtggtcttcatgatgacaaccggttttcgctgcattgcaatgctggggagtctgggaactgtgggccagcaggaaatctgggatgaagtgaatcaggtctaccggtacaccaagggagaccagtccgtgctgatcctgctgtacggcgtggcggtgctgtttctgaccgctttgatggcggccgcatggcacggtgccgtgaagagcgcctacaaagcggaatgtctggataaagcgggaaaacacgtgaacagcttttttgaggacttaaagagcctgcttcatgagaatctgtatcgcttatttatgactcctccgctgacctttattttcgggtttaccgtgctgccgctgatctttatgatctgcatggcctttaccaattacagcaagattgacaaccatctcgtcctgtttgactgggtaggactcgataatttccgggcgctgttcgattccggcagtatcctgggaagcaccttctggtccgtgctgtcgtggactctggtctgggcgttttttgcaacctttaccaactatattttcgggatgatcctggccatggccatcaaccggaaggagacgaaggcaaagggattctggaggttctgcttcgtgttatcctgcgccgttcccatgtttgtgtccctgctgatcatgagaacgatgctgcagcctaacggcgcggtcaacgtccttttaagaaatgtggggctgatcggcgcggatgccagccttccgtttttcacgaatcccacctgggcccgtgtgacgattattgtgatcaatatctgggtcggcgttccctacaccctgcttcagctgaccggcgtccttcagagtattccggaggatttatacgaggcggcaagagtggatggcgcgaattccttccagaccttctttaagattacgcttccgtatatgctttatatcaccacaccgtatttaattgccaccttcaccggaaatgtgaataatttcaatgtcatctacttactgtccagcggcgatccggtgacggacttggcatccacggcggggaagacggatcttctcgtcacatggctttacaagctgaccattgataagcagtattacaatatcggcgcggtaatcggtatcctgacatttatcattctggccgtgggggcgctgtttacgtacagaaacagcaaatcctataaagaggaggaggcgttctaagatgaaaaagatgagatcggcaaagcaggtacggactgtaaataatattctggttcacacggcgcttgccatactggcggctgtctgggtgtttccgatcctgtgggtgatacttaccagcttccgtgcggagaaggggtcctatgtgtccacatttttcccgaaggcatttacactggctaattacagcaggctttttacagataccaccattttgaattttccccgaatgtttgccaacacgctgtttatcgcagtgtgctcctgcattctgtccacattttacgttctggcagtttcctactgcctttcaagactgaaattccgcatgaggaagccttacatgaacatggcgatgattctcggcctgtttccgggatttatgtccatggtggcggtgtatttcatcttaaaggcactggggctgacagaggggaatctgattcgtctggcgctcattctctgctattcgggaggcgcaggcctgacgttccagatcgccaagggcttcttcgacacggttccgagggcgatcgacgaggctgccttaatcgacggctgcaaccgctggcagatcttttcacggattacactgccgctcagcaagccgattattatttacacggtactgacatccttcattgcaccgtgggtggattttatcttcgcaaaggtgatctgccgggccaattccgaccagtacaccgtagccatcggcctgtggaggatgctggagaaagaatacattgacagctggtatacaagcttcgcagccagcgcggtactgatctccataccgattgcagtcctgtttttgtgtatgcagaagtattacgtcaacggtatgtccggggcggtgaaaggttaacttatgacgacagagaaaatgacagcgagagagctgaaacgcttctatgcggacagcacatttaagaaaaattatatatatgacggccatgacctgggcgtttcctgcggcggtgatggaaccgtgtttaaactgtggagcccaaccgcagaacgggtggagcttcatctctacccggatggcggcgaaagcggctgcatgcgatctgtctccatggaacagggggaacagggggtatgggtgtaccggacggaggaaaatcttcacggtacctattacgattacgatgtgacttccggcggagagacacgccggacggcggatccgtatgcgaaggcctgcggaaccaacggaagacgcagcatggcggtggaacttgagaggacggacccggaaggctggaaggcagaccgggctcccgagcggcagcgggaggacattatctatgagcttcatgtaaaagaattttcctgggatgagagcgcgggatttccggaggagctgcggggaacgtaccgggcgtttacggaggaggataccacgctgtcaggagacggcgttcatccgaccggtatccggtatttaaaggaactgggcgtgactcatattcagctgatgccggtctatgatttcggctcggtcgacgaggcgggggacagggagcagtttaactggggatatgatccggtcttttacaatgtgccggaggggtcctattcctctgatccctcccgcggggaagtgcgcatcacggagctgaaagaactggtacaggcactgcaccgaaacgggttccgcgttatcatggatgtggtttacaaccacacctactcggcggattctccgtttcagtgcgtggcgccgtggtattactaccgccagaacgaggatggtaccctgtccgacggttcgggatgcggcaatgactttgctgccgagcgggagatggctgcatcgtttattctggattcggtcctctactggacggaggagtaccatatggatggattccggtttgatttgatggggctgcttcccactgaaatgatgaaccggattggccgcgccctggacttgagatacggcgccggtgaaaagctgatctacggggagccgtgggccgcggacaggactcctatggaaccggggttccaccaggcgcttaaggatcaggaaaagagactggatccccgtgtcgccatgttctgcgacaacacgagggatgcgataaaggggcacgtctttgacgccctgcagcctggattcgtaaatggaggagaagggctggaacgggagattctgcacgcggtttcggcctggtgtgacagaggcggcgcattccgggccggttcgccggaacggatcttaagctacgtttcggcccacgataacctgactctgtgggataagctgattctttccatgacgggccgctgcggcaggaacgtcttttacgaaaggccggaggaggtcatgagggcgtataaactggccgcttcgatctattttacgtgccaggggcatttgttctttctgtcgggagaagaatttgcacgaacgaaggaggggaatgacaacagcttctgcgcccccatttctttaaaccgcctggattataacagggcgtatcagttggaggatctggttcagttttacaaagatttaattgcactgagaaaatgtctcccgggcctctgcgataaatcggcggaagcaggaaaacgcatcttccggaagaatgccggccggaaaggcgtggtgagttttcaggtggataaccggtgcaaagaggcggaaacggggaacgggaaacaggatacaggttccggcggactctgcgatatgctctttattgcctataacagccgccggcggccggttaagatgacgcttccggccggggagtgggaggtgtttttaaaagacggggacagcgggatgtggagacggccgcagagagagacgtattcggggattttcatggttccgcctgtctcggcggttattatggggaagaaaagggagatcatgcaggaggcggagcgatgaagtttatatatgggaaacaggattttaagactctggaacgcggtcaggaaacctgctgccttctgaccaacgggcttggcggtttctcctcggttacggcgattggctcgtcggcccgcagcgatcatgcgtttttcatggcctgcatgaaagctccgaatcacagatacaacatgattcaccggctgtgtgagcggctggtaacggcagagaaagcggtattcctttccagtcaggagtttgcaggtgaaagggaaccggaagacggatttctccgcctctcctcctttcagtttgaggactgtcccgtgtgggtctatcacgcggatggggtcgaggtcataaagacgacggccatgaaacagggggagaacacgattgccgtccggtatgagatccataattacaggagagaggcgtgtcatctcgaggtgactccctttatgcagtttgtgaagaagggcggcgatttaagcccggatcaggtatttacctgttcagacggcagaatcagctcggcggggataacgctctattttacaacaggcggcagtgtgaagacatttgaaccggtctctgagacgtactattacgcctgtgacgcctgtgacggacggcgagagacgggaacggcgctggccaatcatgcggtctgctgtaccaccggtcccgggagccgttcaaagctggagcttgtatactccacggagcctgtgacggaaacggcggaaaaaatcatagatgacgcggtccggtacagaaaggacttagagaggcaggctggttttaagtctgaggcggcttccatgctggcgaaaagcgcggctcagtttatctcccgccgggaatccaccggaggggatacgattttggccggatatccgtttttcgaggactggggccgggataccatgattgcgctgagcggctgtgcactggcgacaggacggtacgggacggcaaagaggatattgaggacatttttgaaggcggagaggaacgggctgatgccgaatctcttcccggaaggcggcagcgaacccatgtataatacggtggatgcggctcttctctttatcaacagtgtttatctgtattttgagaggacaaatgacatatccttggtaagagagtgctgtccggtcatggagcatattgtgaaacagtatgagacagggacggatttcggtattcatatggatgaagacgggctgatcacagcgggacagggcttcgatcaggtaacctggatggatgtgcggatcggtgacatactccctacgccgcgccacggaaaaccggtggagatcaacgcctactggtacaatgcactgcggattatggagaaatttactgagagcccggaggcggccaggcattatggtcatctggcggaattggtaaagcagtcgtttcaggagaaattctggctggaggagaagcactgcctgagggatgtggcctccgggggggaagaacgtgatatccccgacaaccagatccgctgcaaccagatctgggcggtttccatgaatttttccatgcttcctccggaaaaagagaaacaggtggtggaaactgtggcggaaaagttgtatactccttatggactgaaaacgctgtcggaggatgacagagagttcagaccatgttacggaggcagccagtttgacagggatttagcgtatcatcagggtacggtctgggtatttccgctgggcggatactaccttgcgtatttgaaggtgcatggatacagcgaagctgcaaaagcggaggtgtaccgccggctggaggttttggaaggcgccatgcgggaaggatgcgccggacagctgcctgagatctatgacgggaaaaatcccgtttcctcgaagggctgttttgcccaggcgtggagtgtgggagaaatcctccgtgtatatgaagctttggaaagatcatgagaaaaggagaatcgatgatgatggaacaggaattaaataaagttctcggcgaaagatttggaaaaacgattgaggaggcctgcatggaggaaatttaccatgcgcttcttaccattgtaaaggggaaaatgaaggatctcaccccaaatacgggaagcaggaaactctactatatttcggcagaatttctgatcggaaagctgctctccaacaatttgatcaatctcggactttttgatgagacggcggaagttttaaagaagcacggtatcgatattgcagatattgaggaggcggaactggaaccgtcactgggaaacggcggccttggaagactggcggcctgcttccttgattccattgcgacgctgaagctgccgggcgacggcgtggggttaaattaccatgacggcctctttaaacagacctttgcggatcataaacagagggaagaaaagaatccgtggatgaccggggacgactggctgacgaggacggatgttcacttcgaggtgccgtttaaggatcttacggtaacctccaccatgtatgacatcgacgtgcctggttacgaaggtggaaagaattccctccatttattcgatttagactcggtggacgaatccattatccatgacggaatcgagttcgataaagaagatatccggcgtgggctgactctcttcctctatccggatgacagcgacgaaaagggacagcttctgcgtatctatcagcagtattttatggtaagcaacgcggctcagctgattttaaaggagacggaagagcgtggatttgatctgtaccatctccatgagcatgtagtaatccagatcaacgatacccatccgaccatggtgatcccggaactggttcgccttctgatggcaagaggctttaacatcgacacagccatcgatgtggtgagaaaaacgtgtgcgtacaccaaccacacgattctggcagaggccctggaaaaatggcctgcttcctatttggaaaaggtggttccgcagctgatgccgattatccgggaactggatcagagggtgagacgcgatttccacgatgagaaagtctatatcatcgacgcacaggagcgcgttcatatggctcatattgatatccattacggacagagcgtcaacggcgttgcggctcttcatacggagattcttgaggagtcagagttaaagccgttttacgatatttacccggaaaaattcaataataagacgaacggaattacattccgcagatggctgctgcactgcaaccatgaactgtcttcctatatcgaggagctgatcggatccggctttaagattcacgcggaagaactggaaaaactccttgcatatcaggatgacgaggcagttctggaccgtctccgccggattaagcagaatgccaagctggacttaaagaagtatttgaagaacacacagggaatcgagatcgacgagaattctgtctacgatattcaggtgaagcgtctccatgagtacaagcgccagcagatgaacgcactttacgctgtttataagtatctggagatcaagaagggcaatctgccgaagcgtccggttaccatgatcttcggcgcaaaggcggctccggcctatacgatagccaaggatattatccatttgattctctgtctgcaggagttaatcgacagcgatccggaagtgagcccgtatttaaaagttgttatggtggagaattacaatgtgagcaaggctgcgaagctgatcccggcctgcgacatttccgagcagatttccctggcttccaaggaggcgtccggaaccggcaacatgaagtttatgttaaacggcgcggtgaccctgggaaccgaggatggagccaatgtggagattcatcagctggtgggcgacgagaatatctatattttcggaaagtcctccgatgaggtgattaagctctacgataccagcggctactgttccagaaagatttatgagagcgacagtctggtggaggaactggtggactttatcatcagcaagaagatgatcttaaccggcgatccggtaaatctgggaagactttacaaagaactggtttccaaggactggtttatgacgcttctcgatctgagggaatatatcgcagtgaaagagcagatgctggcagattacgaggatgagcgtgcctgggcccgcaagtctctgattaatattgcgaaggcgggatatttctcctctgacagaaccattgaagaatataatcgggatatctggcacctgtaaacaggacggtcccctgggcactggtcagggccggatcagacgctggaggaaagggaatgaaaatggaagagagaaacggacagaaatggtggaaaacatcggtgatctatcagatttatcccagaagctttaaggacagcgacggcgacggaatcggagatttgaacggaatcatagaaaaactggattatctggaggaactggggatcgacgccgtctggctttcacctgtgtgcaagtcgcctcaggacgacaacgggtatgatatctcggattatcaggatatcgacccgctgttcggaagtctcctggatatggaacgcctgattaaggaagcgggagagcatgggattaagatcatcatggatctggtcttaaaccatacgtcggatgaacaccggtggtttttagaagcgaagaagagcagggataatccctaccatgactactacgtctggcgcgacggtgaggagggcgtcttacccaatgacatgagagcctgctttggcggcccggcatgggagtgggtaccggaactgtcccagtactattttcaccagttctccgtcaggcagccggatttgaactgggaaaatgaagccgtacgcagagaaatctatgacatgatccgctggtggatggagaaaggcgtgggcggtttccgtttggatgtcatcgatcagatcgcaaaggaaccggacttaaagattacgggcaatggaccccgccttcatgaatttatccgcgaactgagccgcgagacatttcagaagggcgatatcgtcaccgtaggcgagtgctggggcgccgatacggagcgtgcaaagctctacagcgcgcctgatggaagcgagttctccatggtgttccagttcgaacatattatgctggattccgtaccgggcagggagaaatgggatctggccccccttccgtttgtaaaactcaaggaagttttgaacaaatggcagtgtgaactgcagggaagcggctggaacagcctcttttgggataatcatgatctgccgaggatcgtatcgcggtggggcaatgataaggaataccgcgtggagtccgctaagatgctggctacggttctccatggtatgcagggaacgccttatatctaccagggtgaggaactgggcatgacgaacacggactatgagatcggagagtaccgcgatattgagacgcttcatatgtatgaggaacgtttggaagccggatattccgaggaagagatcatgcggtcgatccacgccaaaggacgggacaatgccagaacaccgatgcagtggagcggcggcgagggagccggattcacgacaggaacgccatggatccgcattaacgataattacagggagatcaatgcggaaacggaagcggcagacccctggtcggtcttccattattataagaggctgatccaattgaggaaagagtatccggtctttgtacatggaagcttccggctgcttctggaggacgatccgaatatttttgcatacgtgagagaatgggagggcgtccgtctgttagtactctgcaatttctttggcagtgaaatagagtgtcctttaaaggagatgtgggaagggaaaaaacggctcctgtgcaattaccaggaggtggagaatgaggagattctgaggccgtatgaggcgctgatgattctgatttaagagaaattctattttaaggaaaaaacgctttggcccggcggctgaacctgcggagaaagactgcaggggaggcaccgggacagggcgtttttttcctgcctgtatgatgagctgaactgcacaaccctggtgaacgccgctgatatgggaaacgaacttggtggtgtgctgttaacgaacagaaatggtgaggagggaaagtaccggtcctttggaaaaacagcctgcataaaaagatttgggtgcatgcacgtatcagttccaggaacacagggggttggggcagtgtaggcagaagggcgtgattctggatttcggcatctgttttaatattacaagtgtgaatgaattgtttttatcggcacacctaattgcgcttgtatgtattctatggtctgtccgtcaatataagtttgagggttcatgatgtcaagttcgaaacacgcaaaaccacactcaaaatgataatgtagatcattcagagtagtcttgcaaccgcagcaaggtacaatgatatctaaagattgctgttctcccgttaaagcattatccattgtctcaccccaccagccaaaatcaatgattgcaccacattttggacattgtattttcactaaattggaaccgcaatcaataaaggccggtttgtcatatgtccgcaccgtaatactatctgcctttagttttgtttggagcagcttacacgttttttcgaatgttgactgttcaatgtgtcgaaagggatctgttggaataaccttaacgatatagtctgacatttttcctccattctctcctgcttggacaaaaacagtattcagattcgcagttcctgatatacatccattatattcttagatgcacccgggaaattgggccactcaccttgctcacctaacccatccccgcttcgtctgtgaattatatgaatataaaaatgaggtaatgactgtcccgcagcttcaccatttgcacacagcaaatccacaccgttatatccacagttatctacaaggcgattggatactttcttcactgtaagaaatactttatttaaaagcttttcatcgcagtctaatatgtttgttacgtgtgttttgggtatattagaatatgaccgtcaacgtccattgctgtatccattattgccaaagtatgttcgtcttcatatactccaagtctttaaatctctccgcatgctattttacaaaatatacagtccatctgtgattgatctcctgtgaaatagtcgtcagttctctaactttaatagtattttgataataccacattcctgtaaataccaccacaagtatattatggataactgataaaataggttgtaacatttcttaaactgtgtttacaataattttccagttctcagcccacagccagtatccatttctccatgacgtaatgccctcctttccttggcagaggccggaaagccgccgttacctgacggtaaaacgacggctttctggctttatgttacagtgtgattagaagttcctggctccgtccgggccgatctggtagccgtcaatctcggtattggccgccatggagccgtccgcatagaagtaataccattttccgccgatttgtctccagcctcctgactgcatgaggcccgcagcatcgaagtagtaccatgtgccttcaacctgcttccagccggtaacgggcctgtggttctcgtagtacagccagctcccggtgtcgttttgcgcccagcccccggcggtatcgcggtcaataacgatctccacgaagcgccgcaggacggcggcggcctcggcacgggtggcggtgtccttcggggcgaacaacctgccgcccttgccgttcattacgcctgcctgctgcatcgcctgtaccgcgtccttcatgtcgctggtaatcgtggcgttgtctgtgaagatttccgcttcccgctctttgggcagggtgtattccagtttcccagcgtaccgctgcatgatgaccgccatttcctcgcgggtcacgggtcggtcaggttcaaaggacgccgccccggtgccgttcacaatctcctttgaagccgcccactccacgaagggagcataataggccgttgcaggaacgtcggaaaaccggctggaggaaggataggctgccgggtcgataccggccagccgtcctaacgccgttacgaacatgccccgtgtaatggtggaatccgggctgaatgcggcgtctccggtgccggtcagaaggttccggctggcgacaaaatcaatgtcacttttcgcccaatggttcacagtgtcggtgaaaatcggtgcgggcctgtatcccacgccgtagatggaaaaatgattgatggagccaatcacgtttccgctgcccttgtcgtagctggaacggtagagccattccgcgccgcccttaccgtccgcatagacgaggtacagaccaccggcctgctcggtttcagcgggggtgtaggcgatgcccacggacacgctgcccacgctggacaaataaactgtctggccgtccttctggtaactgattttcaagtcataggccgggcgggtgccgatagcggaaaggctgtccccggtcagacctggcgccctggccgctgtgaaggtcacgtccccgctggtctggcgggcaatctcggtcagctcggccagtccaaaggtcatatccacaatggacgtgttgagggtcaggtatttcaagttattattcgggtcaaggagacggtcaagggtggcccgtttgagggtgatggaaaagccgttgtaagctgcggccgtggctgcatcatattgtatcgcaatcccgtatttctcccggctcttttgtttggccgtgttcagggccttgataattccctccgatgtgtccccatcgtttgccgtcccagtggctgcaccgtccgttactataacgggcgttttgattacggccagcacggggctgtcaggcttgggcggctgcggggtcgtgattgtgacagaggaatcacgggagccggagctgccgccgctgagtgagctattcttaaaattggctgtggccgtgacctcctggttgggcatggtaaacgtggccgtttcggtgtctttaccgccctgggtgaaagtcacgttgtccggggtgatcgtccagccggtaaactgcttgccgctgggtacggtggccgtgatggtgacgggttcgccctcctggaagatgtctccgctgctcgtgccgccggttaccatcacggtgtaggtggtgggtatatctgtaaaattggctgtggccgtgacctcctggttgggcatggtaaacgtggccgtttcggtgtctttaccgccctgggtgaaagtcacgttgcccggggtgattgtccagccggtaaactgcttgccgctgggtacggtggccgtgatggtgacgggttcgccctcctggaagatgtctccgctgctcgtgccgccatgtatcaacacggtgtaggttggcttttccgtcacggtaaactgtaaatcgaccgtggcgcttgcgccccccgtgccgttgatcgtgagttgttcattgtatgtacccgttggaaggccggttttgggccagatgataaagtcagcaatttcgcccggccttaactccagcttggatagctctgccagctcataggccgtggacgggggtagcgtgagcggggtgagggtcacatcttgactgcccatattcgtcacgaccacgctccgtttgtgcgggtccgggtcatctgcgtctttgcccacttcataacccacattgacagtgccaaaattcagggattctctgttgacctcgatgaaacaggctgggtccgccgcccgcgtcacagtaacgatataggtgcggctgtctgcggaactattttcaacaacaattttaatctcattctccttaccagcctccagcgtaatctcccccgaagtatcgccgctgtcaatgccgatgtcgtttactgtgatagttcccgtgccgtgggcgatgggggtgacggtgacgctcatcgtactattgggaacagaaacgatatagttttccgtcccggcgaagaaagcgggacggagatcgccgtcgctgatggtcaggctttcgagagctgcgccaaatactattttattagcataattgccccacccaccctcattgtacccggtggccccgacgggcacaaaaagggtgagactggggatttgattaataagaccgaaaccgaaattccctaaagtcggcgcttcggacatggggagggtcaacgaggttagattggtgcagccagaaaacgcattcctcccgatagaggttataccgatggggagttccttcagtgcaaggttttcacagttgaaaaatgcattgttcccgatagaggtcaatttgttagggagtttctccagcgcaaggctggtgcagccagaaaatgcatagtccccgatataggtcacattggtggggagctccttcagtgcaaggctggtgcagccgaaaaacgtagagcggttaataaatgtcacaccgccggggagctcggtcaactcaaggttgacacagccataaaacgcctcttgtgcgatagaggtcacattgctggggagctccttcagcgcaaggctggcgcagccggaaaacgccttgtacccgatagaggttataccgctggggagctcctttagtgcaaggttttcacagtttaaaaatgcactttccccgatagaggttataccgctggggagctcctttagtgcaaggttttcacagtttaaaaatacacggttctcaatagaggtcaatttgttggggagtttctccagcgcaaggctggcgcagccggaaaacgcctcgtacccgatagaggttataccgctggggagctccttcagtgcaaggctggtgcagccggaaaacgcattgctcccgatagaggttataccgctggggagttccttcagtgcaaggttttcacagttgaaaaatacattgttcccaatagaggtcaatttgtcggggagctgcgtcagcacaaggttctcgcagccggaaaacgccgagtacctgatagaggttataccgctggggaactcggcctgcgtaagattggtgcaatcctgaaacgcccgggacccgatctcggtcacgtcattccccactataactttggttacatcggtttcgtttatggaagcattatcctgccatgccgtcgttccttcgttggtggtgatggtcaatgtgccattttcaaaggaataaccgttaccctcgatagacgtgacattggatacggtggcgactggcggcataagcccgtcatttgccactgtcgtctgctcattaagttcagaagtttctaacgtgggggcgctgtggtccaggccgtcctctctgtcggctccgccgacattctccttatcctgcgagtcgcacaattcgcaggagtgggtgcagggactccctggcacgtcctccacatatccgcaggtatcgtcatgctccccgcgctcatgggggcaatccagcgcatagcactcctgggtgtgttcatgtacggcagatgcatcgctgtccgtggcggtgggcgtgtcctcatcgtcaaagccacagattaactcgttggtgtaacagtccttggtatgctcatgctggcatggctggcccggttcggcctccatgtacccgcacgcttcggtatgttctgggtggtgttcacataccacctcccggttccctgttgatgacccttccgcataaaccgttgtccctaactgtcccgccagcaaggcggcgcacagaagcagggaaaggccgcgtgtgtgtttcctgttcctcatatggttccctcctattattttttagcggacagacaggggtgtttcccgcagctctgtaagagctacgggaatggggtataccccattccaatccctttacccgcttgaacagctccatcatttttcttcccggattaacggcgcgtccacctggacaaagaatccgccgtcctccatcttgccataagtgaaatccccgaacaggttgttgacccgctcgtccatgcttctcagcccatagcccttgcccgtgggctttgttgtccgcccgttgtcacggatcagcagtctcaccttatcgccgccaaccgtgtatgatacggccaggcgggtggcgcccccgtgcttgatggcgttggtggcggcctcctggcagatacgtaccaggtccgcgtacatgtattggtgttctgatgtttcctccccggaaatctccggcacaatctccagtcccacccgcgccatcgaatcgcggaagcggtagagaaaggctgcgaagctgccgctggagtagtcccctgcggattccagcgacgcgatgctgatgccggtaaaccgcagggcctcccgcagctcggtccgcgccgcctccacatcaggcagggcgctgagggccaggttgtggtgggcggcaatcatggtcagggtatggcccagcgtgtcgtggatatcccgcagcagcagggcctgctcccgcagcgcggcggcttcccgctctatgcggaggttctctctaagttcgtcattttgccgggcaatccgcgcgttggcctcccgcagcagttcactctgccgctttgtctcggccagaagttctaccgtatccgtcacgtcggtcaaaaggatacaccgggccagcggccgctggtttttcccataccgggcaaaggagatgtgggcgttgtagtgcctgccgccgtgctccacgggcatctggccctccccaccggtaagcagggacgacagggccgggtaatccccggtgaaggcatggaggttctccgaacgctccaccctggggaacagggcttcaaaggccgcgttcatcagcagtacctgatacagcttatccagaataactaccggctggtcgatgtggtgcagataccgttcatagtccatgctcaatccctccccttatttcccggacaatgcgccgcacgatctccagcgcctgtgacgacagattccttccccgttccagacgttccggttccggcagggaaacagcctcttccgtattgtcccgcagctgttccagaatgccgcgtacctccgtatccagaagcgacataatcttcatgcgctcctgctgggccgcaaggtggtccgggcctgccgctccagcgcgtccgtctgttcagccagctccctgcgggcagccttcagactggcgttctgcgcctctaactccgtctgtaattcctgataccaggtgacgtcggtcagcatgaccagcgtgttcccgtcctccaggccggagcgtgtggtccggtaagcccgttccggctgctcggccacgccgttgtgatacagcgtccggcctgtggaatcctccacccctaccggatgggccatgttatcaagtacattctttgccgcaataggtgcaaggcagagcgggcggtgataccacacgattaagtaggccccgatgaccatgacgcagtaggcggcgggggtgaagtccaacgcgggattgcgcacgaacattccccaggtgttggcggcaaccggcggaccgaagcagagcaggagcagccaggtggagcggtcctcggcgtcccattttacccgctgcatagtaagataggcatagacaaagcacccataggacagcagggtgaaggggtagaacagcaggctgtagccccgtccggcgaggctgaaccgggtgtagtataaatggtgcaggtcgttggtaaggatagcgagataaaataacgcgcctgtaccgaacagggcggcagtcctgaccttgtcacgatagaacctgtactttccgctgtagcaccagctgagatacacgcaggctggccccaaaacgcacatgcccaggtaacagaggtacagcgccgcccggtaggtattttcctccggccgatagagatagatggagttttcaaggtgctggcccagcgcccagagatagccgaagatgaggataatgcagtaggcggtctgcgtccgcccttgcttccgggcgcgcaggaaatacccggcggcgggtgccgccagaaggagcagtatccattgaaagcccatccatccactcattttgtcactccttttccagtctggcgatcaaatcctcccggtctaccgcccctaatttgcggtagacggcggaaaccaggttccgtgtccggccgtaggttatacccagctccacggcaatctccttgttgtatttgccctctgcaatgaggcgggccgcccgcagctccgtctctgtgagggggcctgtacccggctttttcggcgcgttcagcaggctgcccagcttacggctgacacccgcgtccaccgcaccgaggccgttgtaaacaccgcgtaccgcttcggccagacggggcgggctgccggttttcagcagatagccgtccacgcccaggccgaacagctcccgcaggtattcatcatcgtcgaaggtggtgaggatcagcagcctgacttccggcagttccgaccggaggattttgcaggctgcgacgccgtccatgcccggcatacggatatccaccaccgccacgtccggcggagtctccctgcacaaagccaccagttcctcaccgtccgccgcttcgtccagtacctgtatgtccggttgctcccgcagactgtcggccagggagcgccgcaggacgtcaccgtcctcggccaggacgaccttgattctatgagtcatatcttctcacctcctatttatttatcataccataaaccactaaatatgcccgatttaagttgtcacgcgtgacaactttgtgcctgactgccgccgggcggggatattaaattccgtctccaaagtagtggttataccgatcttttgattatcccaaccttaaagggagttgtttcgctgatagtatccggtacctactatcaaaagaggtaaaagttatccctccctcgggataatagtggcaagcaatacctgtgttaatacacacagacccatcgcccggttttcactggcgcgaaaccgtccgatataaggatttaaactatcacggtctccggtctccgttttcagaaaaggctcagagacgggcctgtgggcattctaaacgtccatcactaccggatatttctggctggatagcagaacgtttctgtcatgtgttgcctggtcttttaattttcttaaagtgaaattcctgcagaaatagagtgaaaagccaatagggcagaggtggaaaattgatgcgtttatcctggctgtacggttattatcatccgttcgcattgcaattgtccatctcattcggtataatgaatgaatacaaatgtcaggaggaattgacgtatgatacgatgtgcaaccataggaaccaattttgtggcagactggtttatgaaggcgctccaggcgtgtgacgggatcacctgcagtctggtttactccagaaacagggagacggcagaggcgttctgtgagaaacacggagcagggcggtggtgtacggatttaatggaggcagcggaagcgaaggacgtggacgcagtctatatcgccagccccaacagcctgcactacgaacaggcggcgctgatgctgtcccacggaaaacacgtactctgcgagaagaccataacctccaacgaagcggagcttaaggaactgatccggctggccggagagaacggcacagtcctgatggaagccatgcgatcggttcacgaggaagggtttcggcgtttgaaggaggtacttccgatggcggggaccatccggagaatcagcttccagtatgcgaaatattcctcacgatacgataaatttaaagaaggaatcattgaaaatgcattcaatccggccttttccaacggtgcgctgatggacatcggcgtctactgcgtccatccgctggtacggctgtttggaatgccgaagaaaattatcgcggattccctgcttctctccaacggcgtggaaggcgcgggtaccatcctggcctcctacgatggcatgcaggcggaactcctatactccaaaatcaccaacaaccgccttccaagccagattcagggagaagatgggactctggtgatcgacaatataacgaatatctgcagcgtggtgttccatgacagaaatgggaatgcaaaaacggtgatcgacctgccgccgaaccacaccctggagggagaggtcaacgactggcttcgtatgatcgagaccggggaaggcattcaggaagagaatgaagcgtctctgatggaactgcgcgtgatggatgaggcgagacgccaggcggggattatcttcccggccgatcgaaagtaaggaggagatttccatgtattattcgacgacgtgtccgtctcctgtgggggttatcaccctggcatccgacggagagaagctggccggcctgtggctggaagggcagaagtatcatggcggcgccattgccggcagtatgacggaaaaagaggatattccggtctttgacgctgcaaaacggtggctggaacggtattttgcgggagagaaaccgtcggcttcggagctgccgcttgctcccgtgggaggagagttccggcagatggtatgggagattctctgcggaattccgtacggcagtgtgatgacctatggcgacatcgcgaaacgaatggcggtgaaattaaacaggcccaccatgtcgggacaggcggtgggcggtgcagtcgggcacaatcccatctcgattatcatcccgtgccaccgtgtcgtgggatcgaatggaagtctgacgggatatgccggcggaatagatacgaagataaaactgctggagctggaaggcgtggacatgtcttcactgtttgttccggctaaggggagcgcactctgaacttgacagaatcatggaggagattgaaataaataagtatcttaagccagaacccttacacaagatgggacggccggaatataatcgagtcagcatgcgaaagacgatcttgttcggctttatggacacaggatacgcttcagtgcctgtctgaatgtaaaagaaaccaaagggatcattctttacagcggtcttggcagactttgaatacatagaatcctggtataacagaaagaggattcacagcgctgtcaattacatgacgcctcagcagaaggggagtgaggaactaaaaaaggtggcgtaatcttccgacttcttttgtctaaagtattgacataggtcagcaagctgtccctgtccgcttccggatcagtaacagtcttctccgccgccagcagcttgtccagtatgcggttgccttcctctttactggagcactcaggatactgtgtcttttccggctctgtgaccggtggttttaattcgttggaatttttacccgaagctccaaagccggttttgcttgcagacgccgctctgcaatgatataatatggttacaagataaaggaaatgcgaatgcgtgagaacgcgttcgcatttcgtcgtttcagggaatatgaacagatttgttcatattggcagggatttaaagaaatgaggatgcaggaaatcgtgctgttacaggcagccccggaaaaggaggtaatgataacaaagcaggaaagtaaggatctgagttatgaagactatcaggatttttttgtgcggcggaaggttttatcaaggaaaggaaggagtcaatcggggacagcaatcatagcacaagccgcattcgggcaggagcgcggatgagtcaggcggcagtaagcgtttcatcatctatagacagtaagcagactatataacgaggaggaatatcatgaaattccagataaagaaacagatggcagctttattatccatggcggtcattgcggtacagtttccgcatgcggcactggcagagacagttgtgccggataacaaaaccatagagtcgttttccgtacatgcggataccgcctcaccctcacaggcagaacaagagaccgatgtgattgtgaaagaccactccgatcataccgggtatctcaaatccggaaagaataatgagatgtgccatatcacactggaaccagttgaaggcggatatgcaaccgtcagcaaaacagaggcactcccctctgatacaatcaagttagaagcttttcctgaaccggattatagatttaaaaagtgggaaataaaagatagtagggggatctggataatatatccgaatcttgacaaacaatccacagagatagaaatgtggctgaccgacattacggtatatgcgaaattctataatataaatgcttcgttatcagaccttaagtaccaggtggaggggagtactcctgtcgatgtgccggggtttactgaggatcaggaaacataccatgtgtttcttccgcctgatacgcaggagaatgcagccatcactttaaaaggggttccaacttatatgcaatcgaggatcatacagaatgacggcatcactctgtccggtgggtccggcaccgcaaccatcacgattcaggcagaggatccttcggtatctaagacctataccgtgaattttgtccgcagctcttatggaatgactccgctcttttccgatcttgatcttggtactgccgaggcaggatacaacccggcctctgccatgcagcccgtaagttttgagaacacgggaaccctgccgctgcatgtgacaagctatgtctgggcaaatgtaggagccttcagacttgtagacgatgccgcaggcataggtttgctgccgccaggtaagacgacatccgtttccatacagccagaatccggtttgaagccgggagtatataaggataagattctcatccataccttggaaggtattatcgttacggtaaaccttacatttaccgtaacagaaaagcctatcccgatcttcaccgttacctttgatcccgcggaagggacgcggaccggcggaggggaactcacgcagacggtccccgaaggcggtatggcggccgccccggttgtcacccgtgacggttatacctttaccgggtgggataaagacttttcaaaggtgacgtcggacatgacggtgaccgctctatgggagaaaaatactgtcccaccggaaagcggaggaaattcctcatcgggcagcagcaaaagctcctcgtcggaccgcggggaaaattccctgcctgatacatcggagctgcacggtaactgggaacagaccgttacgggcatatggaggtttaagatgacaggcggttcctatgcaaaaaaccgctgggggcaggtaaatggtgtgtggtactattttgacggagaaggccggatgctcactggatggcagtatgtcaatcatcaatggtattatctgttcacggaggaggatacagagacaaaaaccggcttaaaagagggggcgatggcaacaggctggtattttgactccgcatatcaggcatggttttacctgggggcagacggggccatggcggtcggccagagggagattgacgggaaacagtactatttcaacccggaatctgacggaacaaaaggtgtgctgcaaaaagaggaggaaactttatgacaaaaatgaagggtttgatagccgggacacattcagattcctgttcctgagacggagggaagtacggtacaaaaggagaaccgagtgccacatgatagaaaaggaggcgtaatgcgatgaaaaggaaatacacacgggtaatatccgcgctgctggctgttttgctgattagcactcagcccgctgtgatgacgtgggcggatagcatggtaccagcagaccacttattgggtggtgacgagtatatgggaaagaagacaggatatgccacgccttcggatgcggaccagaaggatgaggacgctctcaagcctgatgacacgccgaaggacgatgaaataccctccacggaaatcccttccacggaaattccttcccacgaaaacctgacagatggaaaacagccggaatacgaaaacactgagaaaatggtggttcgatgggagttcgttgatgacgagaacttaagcggaggcgagctgtctctgattggcgtaagcccggagaacagggcggatttcgacacggttgtctccatgctgccggaacaggtgagagcggagattgaggagactggtgaagtgacacttctcatagctgactggaactgtctggagtatcagaaggacgaggatggggggtggccgtttaccggtgaatatgagtttatcgcagagttgccggaaggttatgtctgcgagccgcccatatccgtcctggtgacattgggcggagccatggtcaataccatcaatgacagatttaccgtggacggtttaaactataaggaactggggccagacacggttcagctcatcgggtatgatggagcaaagccgaccgggacactggttatcccggatcatgtgcgtaagccttccaatggcagagagtaccagatagtcagcattgggagcgaggcattcctgggctgttccggtctgacgggagaactgcagattccggatgcggtgacaagcattgggagtttcgcattttttagaaccagctttacaggaccgcttatcttaccggaccagctggtgctcattggagacagtgcctttagcaattgttcttttaccggtgatttgacgataccggagggagtggcttccattggcccatatgcattttgttttgttaactttacgggcaagctgactctgccagaaggattgacgaaaatagaaagcgggacatttgaaaattgtggatttactggagagttaaagatacctgatacggttacgtttattgataaacaggcttttgaaaattgcggttttaccggtccattgctgctccccgatggggtgacaagaatttctgaccgtgcattttacggatgcggcagctttacgggcagactgagtctctcggataaggtatctgtcattgggaacgatgcgttttatggaactaattttgaggggtttgacacgactgctcttttgacagctaacctcctttatgattccggtattccagagaatatgattcagcttgtcaattccccttatcaatataaaggtgtcaaatttctcgacggtaatatggaatattatgatttgactgcttccaaatgtcggcttacctcctattatggagacaaagagggtgatatttctattcctgctctagctaaaaattcataagagcaacggtttcaggtattggaaattggatctaatgtgttcaaatatatgcatattacaggtacactccacctttctgctggactggaatccattgaagaaggggctttttccggaaataactttgctggcaatctcaccattccggagagcgtatcccatatcggaagtgccgcttttgagcgtgcaggttttactggcaccctcacgcttccaaacacattaacttccatagaggaacaaacattttacggctgtaattttaccagtctggacctttctgaagggttaacctccataggcgccgccggttttggcaactgcactagtgttagcggcgtgctttatcttccggaatcggtaactgaaatcggggattttgcattttacggctgcgacagcctggaggcagtacatcttgggcgtaatgtgaaaaagctgggaaggaaggcgtttcctgagtcgacgccgctctacaccgactctccccaggtccagcttctcatcaatacctacctgaaccggaataccatagctgacacttcctgggatgggggagaggatgtgccggacggggctatcgcttccttaaagcaggatgtggtggttaccggtgataagcgaatcggcacggaggcggtcatcacggttccggacggaaggaacctaacggtggaaggaaatctgacggtggaaggaaatttgacactggatggaacgctgacactggatggaacgctgttgattcatggctcgatttccggcaccggcaccatctatgtcggaaagggtggcaaggtagcgggagatacttccggcatccgtgtggagtatcgggaagacatagaggccgccaagaagatggttgaaagtcagacctataccttagagcaggaggccgcgggcgacgaggcggcagtcagagactggcttttaaagactatcacagtgattccgggcttaagtgatacaggcgtgacgttgggggagatgaaggtcaccgcttttaagcccgcgatagagggaacttctgacaggccggaaggggtggacggaagctttgctttcactatgccgctcatcaagggaaacagcgaaagcagcgcgggcggcgcgggaaccatcacagccaaaggctacagccacatacccggtcaggaggagtggaaggacatagaggatgcaaagaacatggttgaaggtcagatctatgccatagaacaggaaaacgcgggagacgaggcggcattgaaagaatggcttttaaagacaattgcggcgattccaggctttggggataaaggagtcacggtaggagagttgaagatcacctcttttatgcctgcaacagaagggacatctgaccagccgaacggagtggacggaagctttgtctttacgctgatgctctctaaaggaaacagcgaaggaggcgcaggcggcgcggggacgattcgagccaggggttacagctacatacctggcggccgtccatcgggaaacaatgatggcgaagattatagcagcaatgcagtgaaccccgacatcctgcgtggaacctgggagaggacggagacaggaatctggaaattccgccagacaggcggcgcttacgcagtcagccgatggggcatggttgacggcctgtggtactattttgacggggaagggcggatgctcaccggctggcagtacatcaatcaacaatggtattacctgtgcacggaggaggatacaaagacaaaaattggcttaaaagagggggcgatggcgacgggctggcattttgactccgcataccaggcatggttttatctggggacagacggagccatggcaatcggccagagggagattgatgggaaacggtattattttaacccggaatctgacggaacaaaaggtgcgttgcaaaaggaggaaattttatgacggatacgaatgcttgggaacatgggcgtcgtcctggctgatcagggagccgaatcttcagtgccatatcaagggcgtgatcatcagccattctcatgtggatcatttcttccagggcagcggaatgtgacaacaaaagaggggcatcggtggtaaactgatagcccctctcaatggggtggcaaagggtacccctttgccacacgattttgcgaagcaaagtgttaaagacgatgtggcaggcaaaaccgcttccgcttctggtactgtcatcacgaaccgatgaaaaagacaaaatccaggcgcttctttccggagccaacggctatattcaaaagccctataaagttggaagaatgtctggcccaggcccagtcactgatgcagctatacgcagggctaaaaagtacggagagccgatgctatacgctggtatttggcatggatctgattattaatcccatgtgccggccgtttagctgaaataaataattgaaaacaccctgtggccatttaccggtcacagggtgttttcaattatgattgtgggtcggatagacccagttgagtgcgcgaagcgcgcgaaatagaaaccacccgctatgcgggtgcgcggtgttggttataccaaaaatcactcagcctgatataatagaggtgtccaagccactattaaaaaggagagtgattttatggcgaagaaagccaatgaattagcgcatacaaagtggatgtgcaagtatcatatcgtcttcacccctaagtatagacgaaaagtgatctataatcaatataaagaagacctgagagatatcataaaacaattatgtaattataagggtgttcagatactggaggggaaattaatgccggatcatgtgcatatcctggtgagtatcccacccaagataagcgtatccagttttatgggctatttgaaaggaaagtcagcattaatgatgtttgaccgtcatgccaacttaaagtacaagttcgggaatcgtcatttctggtcagaaggatactacgtaagcacagtgggattaaacgaagacaccataaagaagtatatacaagatcaggagaaggcagatatcatgctggacaaattgagtgtgaaagaatatgaagacccctttaggggttagtcggtattcagatagccccttgaaggggcggcaacagaggtaaaagcacaaagtggcttgaacgaagtgaaagccagcgccttgagacgctggcctagtaacaaaggcttatagccgaagcgcgagccacccgttagacgggtggcagcgactaatcttatttctggtttgcttttttgccttctctcggaagaataatgttcagcaggaccgccacgatggtagcgactacgaccggtgaacggccgaagatggtgactacccagctggggaatgtggatagtgctgcggtggcctgggagatacccatgccgagcgctgcggcaagtcccacgatagaagagttgcggtaagtcatctcttccgacataacgagcttcataccggtcatggcgatagaagcaaagacagatacggttgcgccgcccagaacgcattggggaatggtggtgagcagtgcggagaacttcgggatcaaaccggctgcaaggagaatggcagcggtaagccccaggacacagcggttgactaccttcgtcgttgtaacgataccgacgttctggctgtaggtggcggttggaaggccgcctaacagagcgccgaggatgttggtgacaccgtatcccatgatgccgccctgaagttctttgtcggtcggttcacggtcaatggaaccgctggtggttgctgtaaagtctccgatcgcctgtatggagttgatcgcaaacagaataccgatggcgatacaggaggatggttcaaacataattccaaaatgaagcggctgcggaacctggaaggctgccgctgccccgatgctggagaaatcgaccataccaaagaagagtgagacgatatagccgacaataataccgatcagaatggaagccagcttgaagattccttttccgaaatggttcaggacagttactacgatcagggtcaggaatgcaatggcccagttctgccaggatccataagtcgggctggaggttcctccggccatgtaattgatggctgtggggtacagcgataaaccaatggtgaagactacggtacccgtgatcagcggcgggaaaaatttacgaatttgcatgacaaaagcacccacgatgaaggcaacgacaccaccgacaatctgagcgcctaaaatggcaggaataccaaagtccgcagcaatggactgcatgctgggaacgtatgcgaagctgatgcccatgatgacaggaagggctgctccgagacggaagcttccttttttcccgatgggaaacagctgcagcagggttgacagtgcggatactacaagtgcggcctgaatcaggataacccggtcagcgcctgataagttagcgacattggacacgatgattgccggagtaacacagccgacgatcatggctaccacgtgctgaagtgctaacggcagtgcctgggagaattttgggatgccgtccaactgaaaaatagaagcgtattctttatttgactgtttcatagagagagttcctccttaggttttggaagtactccggaaaaccggatcgcagttttccggcagaaaattataacagcccagaccggtcatttccagaccgaaaaaacaatcaggaaatgagccgtctgaaaggctgctgaatattactgatgaatgcgagtaccggttttccccaggattccctcttttgctttttcaagcagagtgatgagtgcgttgcgcccatccttggaatctgcgaatttcacagcagcctgtaccttcggaagcatggaacccggagcaaaatgaccttcgtccatatactttctggcatcgtctgttgtgatatcgtccaaccatttctcttccggttttccgaagttaatagcgaccttttccactgcggttaagatgattaaaaaatcagcatccagctcttcagccagcagttcacttgcaaagtctttgtcaattacggcacttgcgccttttaaatggttcccgatcagagtaaccgggattccgcctccgccgcaggcgataaccagctgtccggagtccacgagggaacggattgcgccgatttcaatgatttcggcgggcttaggagaagcaacgacacggcggtagccgcggcctgcgtcttccttcatgatatatccgtatttttcttctgcaatcttagcctgttcttctgtcataaaatggccgattggcttggaaggtgcgttaaatgcaggatcctccgcatcgacgcggatctgtgtgatcatggtcgtaaccggaatatccgtgatgtttctgtttaataattcctctctcagcgcattctgtaagtcatagccgatataagcctggctcatggctacacagacggagagaggggtattcggctgattcggatcttcacggctcagtgcgctcatggcgttgttgatcatgccgacctgaggtccgttgccgtgtgcaacgacaacctcgcagccttcttcgatcaggtctacgatcgcttttgccgtgattttaactgccgtcatctgttccggcagtgtattgcctaaggcattgccgcccagggcgatgacgattcttttctttttgttcattgaataaaccctccaccggtttttttagaaatccgcctcacgcagccttgcggcgcgttcgatggaaaaatggccgcccggcacttttcgtgcggggccgcgggaataaaaaaggacgcacctgctactcgctggcagcgggtgcgcccggattccaattctttatttgaatacgcgtggcgtgtttctttcttccagcttctttaagatttcctgtggattctcaaacttggcaaggaagatcatagcggcgattacgtatggcttgaagctggcttctttgtataacggatcgcggtaacggtcgaatacggaagcttctacttcaccgtctacacagcttacgtcattgatatctgccggtaagcagtgtaagtacagagccttgccatcctttgtggtcttcatgagctcttcggtacagcaccagtctttgtgctctgcgttctgagccagtaattccttctccagagccttgatgccctctgtgtcgccttcgccgtaaaggttcgttctcttttccattgctgcgaatggagcccagctcttcgggtaaacgatgtcagcgtctttgaatgcgtcagccatgtcgtgggatacgcggaaggaaccgccggacttctcagcgttctttcttgcaacttcctcaacctcaggcataacctcgtagccttccggatgagctaaaacaacttccatgcccatacgtgtcatcagaccgatgacgccctgaggaacggataacggtttgccgtaggaaggagagtaagcccatgtcatagccagctttttgccttttaagttctcaaggccgccgaactcatggataatatgtaacatatcagccatacactgtgtcggatggtcaatatcacactgtaagtttactaaggttggcttctgctctaagattccgtccttgtggccctgtgtaacagagtcaacaacttcgtgcatataagcgttgcccttgccgatgtacatgtcatcacggataccgattacatcagccatgaaggagatcatgttggctgtttcgcgaacggtctcgccgtgagctacctgagacttgccctcgtctaagtcctggacttccagaccgagtaagttacatgcggaagcgaaggagaaacgggtacgtgtggagttgtcacggaataaggagattccgaggccgctctcgaatacctttgtggaaatgttgttttctctcatgaagcggagagcgtcagcaacggtccagacagcttccagttcttcgtctgtcttttcccaggttaaaaagaaatcattgttgtacatttccttgaaatttaaagcgtttaatttgtcgatgtaatcctgtaaggttttcatattggtataaagcctcctgaaataaagtgtaatgttatttggtatctatcctgcatgctgtacagcccgtcatagatttggggaaggaatgaaggctgccggcaagagtgattgttttaggggtggctgcaggttttaaggagggcctgcagccggcatatatggttacaaaatggcaactgattggctaaataattatttctcgcagtagatagaaggaagtgctgcgtaaacggctgcacacgttactaaatcctgcttccatgtcttctcgttcggagcgtgagcctgagcctctgcgccaggtccaaagccgatacacggaataccgttgcgtcccatgatggaaacaccgttggtggagaaggtccatttgtctgtcaatggacgggctgttctcatggcaagtgtttcttctgcgccgatacgaacatcgccgtataagttcttataggcttcttccagagattttgttaccttgtgatcctctggaataacccatgtcgggaagtagcactcgatcggataagtaagtcctttgtaggaaggacgggaatattcatacatggatacggttacatcattgccgtattttttgacgctcggtaagttgcggatttcctctaagcagctttcccatgtctcgccggctgtcatacgacggtctaaggatacggaacaggagtcggcaacagcacagcggcttggtgatgtaaagaagatttctgaaacggttacagtaccgcgtcctaagaagttggcttctttccattctgcgttgtagctttcgtccagcatcttaacgaggcctttgacttccttgtcgtcggctgcgtcattttcatttaatgcgcgtacatcctgaagaatgtcggccatcttgtagatcgcgttgtcgccgcgttccggagcggagccgtggcaggaaacgccttttacgtctacacggatttccatacgtcctctctggccgcggtagataccgccgtcagtaggctctgtggatacaacgaattccggacgaaccttgtcttcgttgatgatgtactgccagcagagaccgtcacagtcttcttcctgaaccgtaccggttaccagaacggtgtatttgtcgcttaaaagacctaaatccttcatgattctggctccgtaaacggctgatacgatgccgccgcactgatcggaaacgccgcggccgccgatctcagtgtcattctcgtagccttcgtacggatcgaagttccagttgctcttgttgccgattcctaccgtatcgatatgggcgtcgaagccgattaaggtagcgcctgttcccatgtagccgagaacatttcccatatcatcgataacaactttgtcaaattccagttttctcatctcttctgcgatgcggtcgatatgagccttctcgtcacagctctcacccgggaactttacgatgtctcttaaaaacctggtcatgtcagcttcgtaattttttgctgcctctttgatttttgcgtaatccatgattttaataccctccgttttattattattttataatatagttcgattcgcctttggctcatcaaaagaaaattatgcctagcgttctttgccttcccaaacgattgctttgtagcggtccgggtcggtgtcgccctcggtggagaagaggagaacctttgaatctttgttgagccctaagtggtctcttaaatctttgtactcatccatggtcatgatgcaggccagaattccgaatggagcagcgccggactcaccggacgttacggatacgtctcccttaatcggagccgccagcattctcatgccttttgccgctgcccagtctggagcggagacgaaggtgtctacgtgattctttaaaatatcccaggagatggtattcggctcgccgcaggctaaaccggccatgatggtctgcatatcgccgtctacgatctgaatgccgccgtcgccggctttcgcgcccttgtagagacaggccgcaacatctgcttctacaacgacaaccttgggaggattctccggatagcggtttgcgaagtagccctgtacggctccggcaagtgaaccgacgcctgcctgaacgaatacgtgagtcggtctgtcacagccgtattcctccaactgctcgccggcctccatcgccatggttccgtatccctgcatgatccatgccggaatctcttcgtagccgtcccacgcggtatcctgtacgacaacgccgtgttctgttttggaagcagcgtcggcggccatacggacacattcgtcatagttgacttcctcgatggtaacctctgcgccctctgccttgatgttgttaaaacgggtgatggtggagcccttcggcatgaagacaaccgctttctgtcctaaccggttggcagcccatgcaacgcctcgtccgtggttgccgtctgtagctgtaaagaaggtagcctgaccaaattctttccgaagctcttcggaagttaaaacactgtatggaagatcggaaacgtcttttcctgtctgctgtgctatgtacttcgcaatggcgaaggaaccacccagtaccttgaaagcgtttaaaccgaagcggtaggattcgtccttcacgtaaacctgacccagacctaagtattcggccatgtggtcgagtttggcaagcggtgtcttgctgtactgcgggaagctttcatggaatttccttgcctttccgatttcgtccagcgccatgacagataaattcttgtcatctgtcttcggcatggtgttaaccacccattcgattggattcatgatgtttgattctccttcttcttatttaatatgttttatatgaattatctgttttcttttccggcgtccatgtagctgtagagtgtgaacttggatattccgaaaaagttggaaaccttgtcgccggatttggtaatcaggaacgctccggcatcgttcaaatactgaatcgcggtgatcttgtcgtccttgctcatcagagctaccggtttgccaaccagctgtacggactgttcgatcagggtgtctaaaagatcattgacgttgtgtgtaatctttcttggctgcctgtcttctcctgccatctccgcggtggagatgagagagcggatcgcattgtctacggtaagcagccctgtgatgtcataatttaaggaaaagatataatcaacggaaccgtcctttcctcttatatacatggtgctggattttaaaatccgtccgtcatctgtcttcgttaaataggacagccggtcttttaagcattcgggatcccggttcagcgtttcgagaacgatttccgagggtccgtctcccagcttccggttgcttacatgaccgttttcgatatagacgatagagctttctatatcctgcttttttaagtcgtggatgaccacctcacaggcgtttccaaaatgggatgccacaccgtgtgcaatctgtgtcagttgttcgagctttgaatccatcttgcaaccccccttgcttgaaaagtgatttcttatactcccatcataacataaaaaaatgaaaaatcaatactttttctaaaaaatttttaggcaaactaattttttttgtattttcatcttgcatttcttacttttagatgatacactgtacctataaagatatttatagtataaactgcataaaaatgatgggaagggaaaatttctcatagacaatatgcaagaacaaagcgcaggagacggggaaggttccatgtgcacactgtatactcaaaatttttgagattttgacgagaaataaggaaaaagagagaaaaggagatggagacatgctgattatcggtaatggaagaatgatcacaagaaacccggaggctccgtttttggaagatggagcagtggcgatggatggatccactattattaaagtaggagcaacaaaagagataaaggaagcatatcccgatgcagaatatatcgatgccaaaggcggcgttatcatgccggcgtttatcaatgcccatgagcacatctacagcgcgtttgcgagagggttaagcatcaaaggctacgatccgcacggatttttagagatcctggacggaatgtggtggacgatcgaccgcaacttaacgctggaggagacaaggctttccgcgatggcgacctacatcgattctattaagaacggtattaccaccacctttgaccaccatgcaagctttggccatatccgcgattccctgtttaaaatagaagaagcggcaaaagagacaggcgtccgttcctgcttatgctacgagatatccgaccgtgacggcatggataaagccagggaagcagtcatggaaaatgcggcatttatcaagcacgcactggcagacgacagtgacatgatcgcgggaatgatgggtatgcacgcacagtttacaatctctgacgagaccatggaactggctgcggccaacaaaccggccgaggtgggctaccatattcatgtggcggaaggcattgaagaccttcatgactgcttaaggaaatacggcaagcgcattgtagaccgtctgatggactgcaatatccttggcccgaagacgctgcttggccattgcatctacgtaaatcctcacgagatggaattaattaaggaaaccgataccatggtggtacataatccggaatccaacatgggcaatgcctgcggctgtcctccaaccatggagatcgttcacagaggaatcttaaccggtctcggaaccgatggatacacacacgatatgacggagtcctataaggttgccaacgtacttcacaaacaccatctctgcgatccgaatgcagcctggggtgaggtaccgcagatgctgtttgaaggaaatgcaaagattgccaaccgctacttcaagaagcctctcggcgtcttaaaagaaggcgcggcggccgatgtcatcgtaaccgactatatcccgctgaccccgatgaatgcagacaacgtaaacagtcatattcttttcggcatgaccggaagaagcgtgacaacgacggtaggcaacggaaaagtcttaatgaaagacagaatcctgacaaacatcgacgaagagaaagtcatggctgactgcagacaggcggcgaaagaactggcagaccgaatcaacagcagatagagaggccgatgggactggcggaacaaaagcagaaaatgcaggcagaagattccagtgggaaaggcttttgattgatgtaaaatgaagacagtaattgtaatgtaaaagagttttgtatgatttagaattttgaagtaatgatcacaataccaataaagcagaaagaaaatattagaaaattcacagcgaggtgttttctttttttcagcggcagccgggatatcctccaaaaaccgcggacccggcagccaatacatctaaaaagataaatacccgcaaatcaggaggttaatgatgggagacagaatgacaccaatgccattttcacagttagtggagtgggtaatgaaggaacataaggagaaaggaacggtatttggcgtttacagaccttaccaggcgaaggcggagaatgacaggaagatctttggcaggacgctggagactccgattggtccggcggcgggccctcatacccagctgacccagaatattgcagcggcttactatgcgggaagccggttctttgagcttaagacggttcagatcatcgatggtgaggatcttccggtgaataagccctgtattaaggccgatgatgagtgttacaactgtgagtggtctacggagctttacgttccgcaggcacaggaagagtacataaaggcatggtttttactgagcattatggcgaaggagtatgggctgggctccatggatggattccagttcaatatgagcgtgggatacgatctggaaggcattaagtccccgaagattgattccttcattgagtccatgaaggatgcgaaggatacggagacctttagaagctgcagacagtacctgctggagaacgtttccatgtttcagcatgtgacgaaagaggatatcgaaggtatttcttccaatatctgtaattccgtcacgctttccacactgcatggctgcccgccgcaggagatcgagcggatcgctaagtacctgatcgaggtgaaggggcttcacacctttatcaagtgcaatccgactcttctcggatatgaatttgcaagaaagaccatggatgagatgggatacgattacgtcgccttcggtgatttccatttcctcgatgatttacagtatcaggatgcggttccgatgcttcagaggctgatgaaactggctggagagaagaatctggaatttggcgtgaagattaccaatacattcccggttgatgtgaaacagaacgagcttccgagtgaagagatgtatatgtcaggaaagtccctgtatccgctgtccatttccctggctgcgaagctggcgaaggaatttgacggaaagctgagaatctcttattcgggcggcgcagattatcataatattaagggtatcatcgatgcgggaatctggccggtaacggtagctaccaccctgttaaagccgggcggataccagagactggatcagatggcgaaggaactggaactggtaagtcctcacctgcgttcggcggaatgtggaagcgtggaatttacaggcgtggacccggagaagactgcaaagctggcggagtccgcgattacggacgaacaccatgtaaaggcagtgaaaccgcttccgtccagaaagatgaacaaaccggttccgcttacagactgctatgtggcgccgtgtaaagagggatgtccgattcaccaggatgtaaccacgtatttacagctttccggagccggtaagtatgaggaggccatgaaggtgatcgcagagaagaatccgcttccatttatcacgggtaccatatgtgcgcataactgtatgagcaaatgcaaccgcaacttctatgaggatccggtcaatatccgcggcgtcaagctggtatgtgcggaaggcggttacgatgctctgatgaaggaaatcaaggctggagagctgaagggaaagaagactgctgttgtcggcggcggcccggctggtctggcggctgcgtatttcctgacgaagaatggatgtccggctacgatcttcgaggctggcgacagccttggcggcgtggtgaagcatgtgattccgggattccgtatctctgatgaagcgattgcaaaggatgtggcgctggctacggcttacggtgcagaggtgaagctgaacacgagagtggagagcctggaggatttgaagaaggcaggctatgattacattattctggctacaggcgcttccaaaccgggcgtgcttaagctggaggcgggagaggccatgaacgcccttgagttcctggcacagtttaaggcttctgatggaaatgttaatatcggcaaaaatgtcgttgtcatcggcggaggaaacaccgcgatggatacagccagagccgtaaagaggacgaaaggggtagaacactcctatctcgtatacagaagaacgaaacgctttatgccggccgatgaggaagagcttgtgatggcagtggaagacggcgtagagtttaaggagcttttatctcctgtgaagctggaaaatggaaagctgctctgcaatgtgatgaagctgtctgattacgacgcttccggcagaagaggcgtgtcagagacgggcgagaccgtggaaattcctgcggataccgtaattgcggcagtcggtgagcaggttccaaccgatttcttaaaggccaacggaatccatgtgaatgacagaggaagagccatggtaaacgaggagacactggaaacctccgtttcaggcgtttatgcagtcggtgacggcctatacgggccgaagacggtcgttgaagccatgcgtgatgccagaatggctgtggaagccatcatcggcggaaaggcagccagagactttgatgataccgtgaaggatttgggaaaactctatgacagacgcggtattctggccgggacgaaggaatataaggaagagagcacacgctgcctcggctgctccaatatctgtgagaactgtgcggaggtatgtccgaaccgtgccaacatagcgatccgtgtaccgggaatggaaaaacaccagattattcacgtggattatatgtgtaatgagtgcggcaactgtaagagcttctgtccgtacgacagtgctccgtacttagataaatttaccctgtttgccaatgaagcggatatggaaaacagcaaaaatcagggctttgtcgtcctcgaccgggctgctgtttcctgcaaagtgcgttatcttggaaacatttatacttggaatgccgcggacagcgggagcgtaattccggagggcttgcgtaaagtcatggaaactgtctgcaaagattatgattacctattagcatagggaaagcaggtgaacttatgtataccttacaggtaaatggaacgagtgttgccgtagaagaggacttaaagctgattgatgtgctgagaaacgatctggggctcaaatccgtcaaggatggctgcagtgagggcgcctgtggaacgtgtacggttctgatcgacggaaaggccaccaaggcctgtgtccagaaggtttcaaagatggagggaaaatccatcgtaacagtagaagggctcagtgacagggaaaaagaagtatttgtctatgcctttggagaagcgggagccgtgcagtgcggcttctgcatccccggcatggtgatgtgtgcaaaggggctgattgaccagaatccggatccgacccgcgacgaggctgcctttgcgatccgcggcaatatctgccgctgtacaggatataagaagattatcgacgcgattctgctggcggcaaagctgttccgcgaggacgcaaaggatttgaaggcgccggtggtggatcatatcggacagcgcgcccaccgtgtggatgtaccggagaaggtactgggctacggggagtacgtggacgatatggaagtggaaggcatgatctacggaagcgccatccgcacaccgtatccgagggcgagggttctgtccatcgataagtcggaagcgcttgctctgccgggggtccgggcggtcttaaccgccgatgacgttccgggcggcaataaagtaggccatctgaagaaggactgggataccatgatcccggtaggtgagatcacccgttacgtgggcgacgcggtctgcctggtagcggccgatacgccggagattctggacgaggccaaaaagctggtgaagatcgaatacgaggaactggagggcgtattcagcccgcaggaagctttaaaaccggatgcgccgctggttcatgagaccggaaacgtgctggcccatgagcacctggtgcgcggcgatgcgaagaaggccatcgagaactccaaatacgtggtgacaaaggaataccgcactccatttacagagcacgcgttcctggagcccgagtgtgcagtcgccattgtagacagggaaaaagaagaggctctgatctattcttcagaccagggcacgtatgatacgcagcgcgaatgcgccggaatgctgggctgggagctttccagggtccatgtcatcaacaaactggtaggcggcggcttcggcggcaaggaggacatggcggtacagcatcatgcggcccttctcgcttaccatacgggaaagccggttaaggtgaggctgacgagaaaagaaagcattatgattcatccgaaacgccatccggcgtggatggagttcaccacagcctgtgacgaaaacggatatttaaccggcatgacggcgaaggtgattacggataccggtgcttacgcttctttgggaggcccggtgcttcagaggctctgtacccacgcggcaggtccttacaattatcagaacatcgatatcgacggcactgccgtctataccaataatccgcctgcgggagcgttccgcgggtttggcgtaacccagagctgctttgctacggagtgtaacttaaatctgctggcagagatggtggggattactccgtgggaaatccgctaccgcaacgccatccggccggggcaggagctgcctaacggtcagatcgcctctccgggaacggcgcttgcagagacgctggaagcggtgaaggaggtctatgacagccacccgtacgtgggcatcggctgtgccatgaagaatgccggcgtcggcgtcggtatcccggactggggccgctgccgcatgaccatcgaggagggaaaggtatacgtccgttccggtgcctcctgcatcggccagggattgggaaccgtgctggagcaggtagtctgtgaggcgctgggcgtgacaggagaccgcgtagtctatgtggctgcggagacgaacctggcccccgattccggtacgacttccggttcccgtcagaccctggtgacaggcgaggcggccagaagggcctgtatggatattctggaagatctgaagggaggaaagaccctggaggatttaaacggaaaagagtattacggagagtatttggcggctacagatcccatggggtgcggcaagaagaatccggtatcccatgtggcctacggctacgcaacccaggtggtatgcttaaacgaggacggaaccattgaaaaggtggttgcggctcatgacgtcggtaaagccattaacccgctgtccgtagaaggacagatcgagggcggcgtggtgatgtcccttggattcgcgctgaccgaagatttcccgctggatcatggaaagccgctggccaaattcggtacgctgggcctgttccgtgcggataagactccgccggtggagagtatcattgtcgaggaaaataaggatccgctggcatacggagcagtgggaatcggagaaatcacctccattccgacggcaccggcagtccagggcgcctactacaagctcgacggaaacttccgcacgtcgctgcctctggaagatacggcatacagaaagagcaaaaagtaatcgcaaaagtaaaaagcaaaaccttgataagggcgcagagggccgagcagtatggtcctgcgcccttaaagtaaaaatacgtttctccactggaaacggttgtatgcaaaagaaaaataaggtatactgaaaataagttatttcagtgaaaattcacagaaccttatgcaggttacgcttatgcatgcgagcggagattggaggctgtcatgttcagggaattgagaagaaaaaatcagcagttatcggaaacggaagccaggagtattttaaagaacggaacttatggagtactgtctgtacagggagacgacggatacccgtacggtgttccgatgaactatgtgtacggagacgatgccatctattttcactgtgcaaaggagggccataagatggagggctttcagcgctccgacaaggtttccttctgcgtggtgggggaagatgaggtgatcccggaagcattttcgactgcttatgccagtgtgattgtatttggcagagcttcggttgtgacggatgaaaaagagaagcgggaggcgttaaagcttctggcggaacgattttccccggaatacacgaaggagggcgaggcatccattcaaagcagctggaacgatgtctgcgtcgtcaggctgaagatcgagcatgcggcggggaaagccggtatggaacggattaagcgggaggaagcccgatacgcttctttcctgtaacagacagctttacggggattcagacagcagaaaggaaggatttgtcccatgaaaaaagtattaaaaggcggtaccgtggtatcgggcgaaggctgtaaaaaagctgatgttctgatagaggatgggaagatcggggccgtagctccggagattacggatgaggaggccgaagtggttgatgtgtcaggaaagcttttgtttcccggctttatcgacgcacacacccattttgatctgcatgtgtccggaacggttaccgcggataattttgagacgggaacgaaagctgccttatcaggcggcacaaccatgattattgactttgcgacccagtataagggagaaagcttacataaagcgctggagaactggcatgaaaaggccgacggcaatgcttcctgtgattacggctttcatcttgccatatccgactggaatccggatatcagcgaagaactccggcagattgtggacgagggcgtaacctcctttaagatctacatgacctatgacgacatggtgctggatgacaaatccatctaccaggtcttaaagcggctgaaagaggtgggcggaatcgccggcgttcactgtgagaataaagggatcatcgaggcgctgacagaagaagagaaggcgaagggccatctgactaccgacgcgcatccgaagacgagaccggccgtggtggaggcggaggcaatcagccgtctgctgaagattgcggatctggtgcatactccggttatcatcgtgcacttaagctccggagccggttatcaggaggtgaagtacgcgagagaacggggccaggaagtgattctggagacgtgtcctcagtatctcattttaaatgaaagcgtctacagcctgccggattttgagggcagcaaatatgtgattgcgcctacgatcaagaaggagacggacagcacaagactgtggaacgccatcagaaaagaccatattcagactatttcaaccgaccactgcagctttaccaccggccagaaggcggcgggaaaggacgattttacgaagatcccctgcgggatgccgggagtggagtcgaggccggccttaatttacagcttcggcgttctggaacgggatttgaagctggagcagatgtgccgtctgctgtctgagaatccggcaaagctttacggcgtctatcctcagaagggggctgtcgctcccggaagcgatgcggatatcgtcgtatggaacccggatatcgagtggaccatgtccgtggagaaccaggttgccaatgtggattactgcccgtttgaaggcacgaaggtgaagggaaaagcggagctggttttcttaaagggcgagctggccgcaaaggacggcaaggtcgtgttagagaagaccggggcctacgttccgagaaaacggcggatggaactggattaagcatgccgccggaatgtgctgatccgggaattgaaaggatatagaggtatggtattttacagttgggaacatgacggacttcgggaatgcggctctctgtgggaggcattagcactttctgtaaaacgtcacagggtgattgccctgaccggcggaggcggaaagactagcgtcatgttccggctggcggatgaactggcagatatggggaagacagtgattgtaacgacgacgacccatatctttcatccggcggaccggaacgtggtggagagcgaccgtgcttcggatgcggcggaatggctggcgcggaatgcgcggaagccggatcgaagcagggctgatcatggtaacggtacagtccttgtggctggtgtgcctgcggcggaaggaaagcttaagagcctgcccttaacggagacggcagtgcttaaagaactggccgatgtcctgctgattgaagcggatggggcaaagcggcttcccataaaggtaccgggaaacggagaacctgtgattccggaatataccgacgtggtaatcggctgtatgggactgaactgcatcggcggtgaactggaggagttctgcttccgcacagaacaggcggcagctctgctgggactaaagaaagaaccgaatggccgttacagccaccggattacgtgcggtgatgcggcgaagattctcaccagtgatgccggtacgagaaaactggtgggggaaagagactaccgggtggtgatcaataaggcggacgatgagggacttctggcaaaggcggccgagatagcaggggaagtggaacggctgtcccaggtgcggtgtgcggtgtcatgctttctggaccggaagcatccgcagcaggagcgcgaagtgtgacagcggaaaagaaaggcggcgaagatggaacaggagaaaaaactgcgtttccatatgaaactcaggctttactatgaggaacggaattttggaccgggagtcgcaggtctgatgcagctcgtgagggagcgcggttccttagcggccgcgtgtcaggagatgcatatggcctattccaaggcatggaagatcatacataaggcggaggaggacctgggatttccgctgatggagggaaagcgcggcggagagaacggcggagccacggttctgaccgaagagggcgaagcgtttttaaacaggtacctgcagtttgtgaatgaagcagaacatgcggttgcagagttgtttgaaaagtattattgttcatagagacagatggggacagataattacccattttaattttcatatggatattctcaagtgagaatatcgatgcggcagatccgtcactttgaagaagtgtgaaagagaacgggtgactataaaaatgaggataaaggagctggagtcatgagggagatcaggacagaagatgcggtgggacacgtactgtgtcacgacattacgcagatcattccgggagtgatcaaggatgcaaaatttaagaaaggccatgtggtgacagaggaagatattccggtgctgctctcgctgggcaaggagcatttatacatctgggaaaaggacgagtcgaaataccatgaaaatgaggcggccgagattctctgcggtctgtgcaggggcagccatatggagcggagcggcgtaaaggaagggaagatcgaactgacctctgcggtccgcgggcttcttaaaatagatacagagctgctggacagaatcaacagtctgggcgacatgatgatcgcttccaggcacaacaatacaccggtagagccgggcgataagctgtgcgggacacggattattccactggttattgagaaggagaagatggatgaggctgtggcggtctgcggcggaaaaaagatcttttccatacttccgtatcaggataaaaaagtgggaatcgtgacgacgggaagcgaggtttaccacggacggattcaggatgcatttggccctgtgctgaaggaaaaggtgaaggagtttggcggggaagtgatgggacagacgatcacggatgacgatccggaccacacaaggaaggccatcgaggaatttatcgcccagggagccgatatggtgttggttagcggcggaatgagtgtggatccggacgacaagacgcctctggccattcgcagtacgggggcgcgcgtcgtatcatacggggctccggtacttcccggcgccatgtttctgcttgcctattacgaaaaggatggcggccagattccggtggcgggccttccggggtgcgtcatgtatgcgaaacgcaccgtatttgatctggtgcttccccgtctcatggcggatgatcctgtaacaaagacagagcttgacaaactgggaagaggcggtctctgcctgtcctgtgaggtctgtcattatcccaactgcggatttggaaagggctggtaagatggaaggactgacacattttgatgaacacggcaatgcacgcatggtggatgtgggtgagaaggccgtgacggacagaatcgcagaggcgcatggattgattcatgtaaaccgtgaggtctacgaggccataaagcagggaaccgccaaaaaaggagacgtgctcggtgtggcgcgtgtggccggaattatgggggcgaagagaacctctgaactcattccgctctgccatgtgctgatgctgacgaagtgtacggtggactttgttcttcatgatgaaatcatggccgtggaggccgtctgtaccgtgaagaccagcggtaagaccggggtggaaatggaagcgctgaccggcgtaaatgtggccctgctgacaatctatgacatgtgcaaggccatggaccggggtatgaccatgacggatatctcactcctgatgaaggatggcgggaagagcggcctttaccggaaagacggagagcgcctatgagagacgaaaatggaagaacgatcgactacctccgcatttccgtgacggatcggtgtaatctgcgatgccgttactgtatgccggaggaaggcgtcgcgttaatgaatcacgaagatattctcacataccaggaaattctcagaattgcggaagccggagccgggcttggaatccggcgcgtgaaagtgacaggaggggaaccgctggtgagaaaaggcgtcatccagctgatccgtaagctgaccgcgatagacggaatccaggatgtgacgatgacgacaaacggcattctgctgggggaaatggcgcaggagcttgccgcttcagggctgtccagcgtcaatatcagcctggataccttggacccggtgcgctttcaccggattaccagacgggattgctttgcagatgtcatgaaagggattgaagcagccggaaagagcgggcttatggtaaagctgaactgcgcggtgatggaagaactgtgcagggaggacgtgcttgcctttgcagaatactcggtaaaaaacgggattccggtgcgctttattgagatgatgcccatcggccagggacgaaaataccatgccatggataacgaggagctgcttgccgtcctttcagaggaatacagcgatgtaaggatcagcacggagccaagaggaaacgggcccgcggtttactatacatttgcgtcgggggcgggctgcatcggcctgatcagcgccgttcaccacaagttctgcgcaggctgcaaccgggtgagactgacctcggacgggtttttgaagctctgtctcgacagcccggccggagttgatttgcggacaccgctgcgaagcggtatatcggatgagactctgaaggatctgatggaacagtggatcaggaagaaaccggaaagccatcacttcctttcttcggccggcggtgagaaagaggggctgcttttcgatgatacagagaaacaatgtttaaatatgaatcaaatcggaggataagagtatgggtcagattatggctgtctgcatcagcgagaaaaaaggaacacagaaaaagggaatttcagaaggccattttatagaagaatttggcattgaacacgatgcgcatgcggggaaatggcaccgccaggtgagccttctgtcttatgagacgatagaggcttttaaggcgaggggagccgagatcggtgacggcgcattcggtgaaaatgtgattgtgaaggggatcgatctggttcaccttcccgtgggaacgaagctgtcctgcggggatatcctcctggaggtgacgcagatcggcaaggagtgccacagccactgtgagatttttaagaagatgggagaatgtattatgcccaccaatggaatattcacccgggtgctgcacggaggcgtgatgaaggaaggggatgaaataaacgtatgtacagagcaggaattgtaacgctcagcgacaaaggagcagcaggggaaagggaagataagagcggggctgtgataagggagattctggaggcggcaggctatgaggtggcggctcagagtctgcttccggatgaaggagaggcgctgaagaaggaactgatccgtttaagcgaccaggttcagtgtgatctggtgctcacaacgggtggaaccggtttttcccggcgtgatgtgacaccggaagccaccatggcggtggcggaacggaatgcccccggaatcgctgaggcgatccgtgcctgcagcatggcggtgacgaaacgcgccatgctgagccgcggggtgagcgtgatccgtggaggtacgttgattatcaaccttccgggaagcccgaaggcagttcgggagagtctggagtatgtgctggatacgctgccccacggcctggacatcctgtcgggacgcggcggagagtgcgccagaaagtagaacagatcagaacacagagcagatcagaacacagaggaaatcagaaaggaagagaacattgtggaaagagttttgataaagggagccggagatcttgccacggggatcggatgcagactgcaccgctgtgggttttcagtggcaatgaccgaaatagcggttcctacaaccgtgcggagaacggtggcattttcccgggcggtttacgaaggaagcgccctggtggaagatgtcgaaggcgtgctttgccggaataccggggatatagaccgtgttgtgaatcaggataaagtagcggtgattgtggatgagtcatgcgagacagttagatcctggaagccggatattgtggttgatgcgatcttagccaaagtaaatctgggaacggaaataacggatgcagagatcgtcatcggtgtcggccccggattcacggcggggagggattgtcatgtggtggtggagacgaaacgcggccacaatctgggacgctgtatctgggaaggcagtgctttcccgaatacgggagttccgggcatgatcggaggatacgataaggagcgcattattcgcgctgcctctgatggtatatttacaggagctgtggagatcggaaccctggttgaaaagggggatgtggtaggcagcagcggaggaactcccatatatgcagaggtgggaggcgttgttcgggggctgcttcaggacggtgtggcagtgacgaagggaatgaaatcaggagatattgatccaaggggtgtcacggaacactgctggaccatttctgataaggcaaccgccataggaggcggagtgctggaaggaatctttcatataaaaaagaacaggagagtaaagtgatgaaaaaagcaattctattagcaggtgcattaactgtggcgatggcggcgctcaccgcatgcagcggaaacggaaaggctgaaccggagacgacagtacaggcggcagagtcagccgcagagacacagaaggagaccacggcgaaagcggaagaaaccacggcagaggcagcgaaagaagcggaagcacagactgtgactatcgcggcggcggccagcctggagacctgtttaagagatgaactgattccgctgtttgaagaacagaaccctggttttacagttgtgggaacgtatgacagttcaggaaaactgcagactcagatcgaagagggagccggtatcgatgttttcttctcagcggcgacgaagcagatggatgcgttaaacgacgaaggcatgattcaggagggaagcatgaagaatctcctggaaaataagattgtttttatcgtaccgaccggtgatgaaggcagctactcgtctttcgaggatattgcaaaagctgaaaacgcagcactgggtgatccggacagcgtgccggtgggccagtattcgaaggaagcgctgactaatctgggcctttgggatgaagtgcttgcaaaggccagtctcggaacgaatgtaaccgaagtcctgaactgggttgctgagggaagcgcaaaagccggaatcgtatatgcaacggatgcagcgcagaccgataaagtgacgatcgtggctgaagcaccggaaggcagcgtgaagaaggcgatttatccggccggtatcatcaaagactgcgaaaatcctgaaggggcacagaagttcatcgatttcctggccggcagcgaagccatggaaatctttgtgaagaacggattcgcagctgcgcagtaatatgctgaattttaaacatgcaccagcactgctgtgctggtgataaggaggagaaacaagtggattactcaccgattctcatttctctaaaaacatcggtcatatcgattatttttacattttttctgggaatttgggcggccagggcggtgattgccctgaaatcagaacgggcaaaggccatactggacggtgtgcttacacttcctctcgttcttccgccgacggtggcaggcttctttctgctttatatatttggtgtaaagcgtcctgtcggaaagctgcttcttgcagtattcagctataaaatcgtgtttacctggcaggcgacggtgcttgcggcggtgctgatatcctttccgcttatgtaccgttccgcaagaggcgcgttcgagctggttgatgaaaacgtcttaaatgcggcaaggactctggggctgccggagcgaaaggtattctggaagattttgatgcccatggctatgcccggtgtcctgtcaggcggagttctggcttttgcaagaggcctgggggaattcggagcgacggccatgatagccggaaatatcgctggaaagactcggacgctgcctctcgccatctactcggaggtggcggcaggggacatggagggggcggggaaatacgtggttatcatcgtcgccatttccctgctgatcgtggccggtatgaacgtggcagccacaggcaaaaagaaatatttataggagtgagccatgagcctgaaggtagagatcaagaaaaaattgagggatatgactttaagcgttgcctttgacacggacagggattccggaatcacggggattctgggcgcgtcgggctgcggcaagagtatgaccttaaagtgcattgccggtatcttcacgccggatgagggaagaatcgagttaaacggccgcgtgctctttgattccgagaaaggaatcaatgtaaaaattcaggacaggggcgtcggttatctgtttcagaactatgcgctgttccctcacatgaccatacgggagaatgtggagatggctctttcctgtccgaagagggagcggcgccaggctgccatgcggtatctggatatgtaccatatcggagaactggcagaccggtatccctccagactttcgggaggccagcagcagagggctgcgctggcaaggattatggcgtcgaagccggaagtgctgatgctggatgaaccgttttctgctctcgattattatctgaaggagaagctgcagctggagcagctggaagaactgaaaaactacgatggagatgtgctgctcgtcacgcacagcagggatgagatttatcgtttctgcagtacgatccatgtgattaacgagggagaaattgtagtgtccggagcagtaaaggaggtctttaaagagccggagacggtctctgcggccaaactgacagggtgtaagaacattctggacattaaatatgtagatgaccacacattttacgtgccaaattgggatatgcaggttataataagagacaggaacgtcccaaaggatgcgccatttatcggaatccgtgcccattactttaccgccgcccgggaagaggcagaggtgaatgtgatggaatgccgcttaaaacagcttctggatgatccatttgaggtcacactcattcttgaaaatgatctctggtggaagataccgaaagcacgctggaaggatgagatgaaagagcgggtgccggagcgccttgtggtgccggaggagagcattttctttttaaaggacaggtagaatggaggaattggcagatgaaactgactcttatactgctggcagcaggagacagcaggcggtttgacggaaacaagctgcttaccccgtttcacgggaaagcgatgtatcagtatatcgtggaggaggtggcaaaactgccggatgaccttttcgataaaaagatagttgtgacccagtatcgggagattatggaagatctgggaaaaagaggctatctggtggtggagaatgtgcagagcagtctgggaatctcccgttccattcacctggcactggaagctgcgtcgccgcagaaggctgaggaagctgcgtattgcttcgcagtctgtgaccagccatatttaaaggcagataccatagaggacctgattgaaggctggaaaaacagtaagagaggaattggctgcctgtgtaacatgggagagttcgggaatccggcgattttctcggatatgtacagggaggaactgatgacgctggaaggcgatgtgggaggaaaaagggtactgcgaagacatattgacgatctgtacttgcatgaagtggatgatggcctggaactggtggatattgatgtgagaggctgagagatggatatgaggcgtgggatttcattgacggaattccacgcctgttatttttttgcagcagtaagacgtatctctgtccgggtggggattgtgtagctagatataccttagttcatgggccaataattccattagccggcggtcatccagttccccgtgttctcttagaagtgtgtaaatctgagttacataggctttatccagctccagttcttctgcggctgtttctggcaccagatgtttttcaaacttttttcttaccagttgtatctggaccataagacagcctagggtaacgccaagttctctttctccggccaaatgctgctgttcatcatattctgttaaaatcacatgattcacctccgctctgtgaatggacaaaaattccgcgagaataccgtcttttatacaggaatcaatggctgactgtgttgcagctgtgagggagaggccgtctgcaagtccgtctctgatgcggccgataaactctgaataatggtgcagctttctgcaatgtcttatgataacatatttttacataaaatacaagtataaaacaccacgaaacaatttaaaacattactgcggcagctttctaatacgtcagtctccggcagcagataaggattgacaaactgcgcgattgtccgtaaactgaaattaaaaacagcataatggacagataaggagggacggtttatggattgggaacagcttatgacggaactgagaaaaaaagaggatccgaaggtgtatgcggaactggggtacagagatgcctctgtgattccgctgtttatcgaggtgatggagaaggagaaaacggcggttaagtatcaggctgagaaggcggttcggaagatcagtgaagagcgccccgccatgcttcttccatatgtggatcgcctgatcgggcttttggacagcgataataattttatcaggtgggggatgcttcttacgcttccgggacttttagaagcaggcgggaaagatatctggatgaaaatgagaaccaggtatcttctgtcgttccgatcccggcaggttgcggagtttggcaatgcggtctcaagtacggggaagatcctgagagcctgtccggaagaggaggagacgatcatccctttactcctgaagatagacagccatactttttttcatcacggagtgccttccccggaatgcttaaatgtggcgaaggggcatatactggagtgctttctggaacaattcccggataccgcttatcgaacagagatggcctcctttgctaaacagaacctggaaaacgacagaaaacaggtgtgtatcagggcacggcggcttatgaaactggcaggtgaagtgtgatacggtaactgctgaccggtggaactgggaaatgccggtcagcagtgcggcctatttgcctgcccaggaatcggctgcctttgcatctgcttcacaggggacatcgggaagaatcgcctgtgcagcttcttccatcgcagtctttaacagaacgaccgtatcgtctgcctcttccacggggacttccatcaggatctcgtcgtggacgatggcgacgatttttttgtcgctcccccggattctggaggcaaggagtccaagggcgtgtttcagaatatctgcggccgtaccctggaccggggtgttggccaagtcagccagtccggtgtttgggggaaacagaaatttacgcccggtgagcgtccggccttccaggggatggctctccctcaagtcgtggtgccaccagttgatcccgcggtaactctgaaagaaggcgctgcgaaactgctccgcttcctctaatgtcatctctacgccgtacgactggcctgcatactgcttaagaccctctgcacccatgccgaatatcaaaccgaaattcacggccttcgcggcctggcgctgtgctttggtcacctgactgaccggtatgctggaaatcagggaggcggtgagcgcatggagatcctcccccttctgacaggcactcttcattctggagtcgccggagatctgtgccgccactcgcagctcgatctgagagtagtcagccagaatcagctttcttccatcaggggccgtaaaacagctgcgaaaatcagcttcccgcggaatctgctggatattgggattataacagctcattctcccactccaggcgccgatctgcatgtattttggatggagccggtgagtaacgggatgaatctgggccggtatggggtggaggaaggaggagagggatttggaatgtcttctgtattcggtaagggcctgtaccagaggctggctgtggtagggggccaggcttctccgcgaggtggaggtgaccggaattccataccggttcagcagtttgagcacatagggattgctctcaaagtttacatccagggcctcttcaccaccccacagggtcagctggcaggagggggtgccgctgtaggtatagagagtctccagtgcggcgtcgtactgtttctcagtcttccggcgaagctcgtcccatttttccagatcgagattgattccgtcgtattctgcacgggcaatagcggagacacaggcaaattcaatggaagccgtccggccgagaccgtgacgggccagaagcggattcattacatcatacagcttcagaagaatccatgcatccagcgcggcataggccagctgcgatccagtcagggaggcgctgtcccaggaaccggtctgctctgtcttatccagcttaatgccgagatagtggtctgccaccaccgccagcccggcctttaaagggcctccgcacggccggagcagctgagcggccagcatcgtgtcgaagactggaaaacaatcgattccaatccccattagaaactgtaagtcaaacctggcgttgtggaatatcttttccgagggagtgttcagaagctctttgaggcaggcaaatccatctggaagaaatgcagcgcagtcgatgacaagcaccggaataccgggagcgctgatctgaatcagacggagcctgtcgctgtgcgggtcaagcccggtggtctccgtatctatggcaagaagcggcgcttcttttactgtatggaagtagggggtgagatcggaaggctgggaaataatccggaattcaacggataaatccgtagaaaaagatgtctccctgccggattccagggggaggtccggcgtcccgctgttgatttctgccccgagagaagtctgaagatgtggtggttcaatccggtcgtttgactgactgattacgttttccaatgcggcctccttcctgtctgcataaaacagaacatacgttcttgatcttttcagtatactatattgtgggtaaaaaatcaatgaaaaatatagaatttcacgatcttatggcagcggttctgcttttggaaaaaaatatagatggcagaaaatctgtatatagggtaaaatagacaaagtttataaaggaagatggaatttgcttacaaaaataagtgtttgagagtaaaatggaaaaggatagaccgtatgaaacgatgcaggtctggggaaaatgatctgacgtgaaagcatatgagagaaaagggaatttatctatagaaagagatcagacagatggatgaggaagaaaggaccgggtacggatatatgaagagcagagagtacaatctggcgccggaagaggaaaaggccagaaaacagatgatggagctgattttattatccagccgttttgcaagcagcattacggtggaaaatgaagagaagcattttaatggaaagagtattctgaaggcgggagaattgaaaaagggagagcatttttatgtggtggctgacggcagcgatgctgaggcggcaatcgaggcatttgaccagttatttccgcaggcagcgggaggaatctgaccgcaggaagctgtgaccggagtacaatcggtaagaaaacgcgataagaaagcgttaagaaatgcggacgtttcttgacaatgaagcgggagttttctataattcactcataaataccgcttgatgcagaaaggaatttacacatttcatggacgacgccgacagtgacgcggaacctgacacgcacagggcaaatttttatacgacggttacataccgcttaataaaatcgaataagagaatgaaattattgacatagaagcataacctgcgtttcctccggaaaggcgggctatgctttttgtgtgtgcaaagaaagaagagaggaaagaaaattttatggaagaacagagtatctcactgatgattattattggatgcattatcatgtccgcgtatttctcggcgacggaaacggcgttttcctcgctgaaccggatccggattaagaatatggcggagaagggaaataaaagggcgcagctggtgttaacgctgtctgaaaattatgacggactgctgtcaacgatcctgatcggcaacaacattgtcaacattgcgagcgcgtcgctggcgacggtcatattcgtaaagctgctgggcgatgaggcaggagcgagcatttcaaccgtggtgacgacaatcgtggtcctgatctttggcgaggtttctccgaagagtatcgccaaggagtctccggagcagtttgccatgttttctgcaccgtttttaaatgcgtttatggtggtgctgacgccggccaactacttatttaagcagtggaaaaagctgctgtcactcctgatccggacttcgggagatcccggcataacggaggaggaactgcttgccatcgtggaggaggcaaaacaggatggcggaattgatgaacaggaaggaagcctgatcaaaagcgccatcgaatttacggagctggaagccatggatatcgcaaccccgcgcgttgacgtgacgggaatctccattgatgcggataaggaggaaattgcggcggtgtttgatgagaccgggtactcccgtcttcctgtatataaggaaacgatcgacgatattaccggtattatttaccagaaggacttttataaccggatgtatcgcggtacatgcggtgtggaagcgattgtacggcctgcgctgtatgtggcaaaaagcaagaaaatcaatgtccttttgaaggaacttcagaagaataaaatgcatattgcggtggtaatcgatgaatttggaggaaccatgggaattgtaactctggaggatattctggaggaactggtgggagaaatctgggatgaacacgatgtcgtggttcaggagatcgagaagatttctgatcaggaatatcttgtttcagggaatgccggcgtggaaaagctaatgggtgagctgggctgtgaggaaacgtttgaatcgtttacagtcagcggctgggtgatggaactggcggagcggataccggaagaaggggatgtgttctattatgatcacatgagcataaccgtcataaagatgagagacagaagggtggagcaggtaaggctcgtgctggaggcagagcccatggaaccgtgtgcagcttccttctaaagtcactgcaaaaaaacagatagaaaacagcctgacctcgtgctataataaaaacagtagaatttgaacgaaccaaaagcgaggtgcagcctatgccaacaatcaaagatattgccgccaaagcaggggtatcccacggtacggtttccaatgtactgaataagagagggaacgtcagcgccgaaaaaatccagctggtggagcgaattgccaaagagatgggatataaaatgaatgtccaggcccagcagctgagggccggtacggcgcggagagtctgcgtcattgtgcccaagatcagcttaaaatgctacaatgacttatataccgggctggaacaggtcctgcgggagcacgatatcagcatagagctcatatccaccaataacctggagcgtgatgaggaaaaagcggtaaagaaggcgctttccttaaatcccatggcggtggtggtggtcagttcccttctcaagaacaggggggtatttaccccggataccagatttttctttgctgaaagaaaggtgaaggggatgccggagaactccgtctatatatccttcgggtttgaacaggcaggacgggatatcgcgctaaaatgcatcggggacggccatcagaatgtggctctgctctgtgagaacagcatctattccaacaacaagagcttcatgaacggtgtggtggatgtgctggaagatgataactgctcctgcaaactgtttcccggtgatgacagcatgtggtttaataaggcgttcgatattctgggctccaaggaggaattcgatgcagtgatcgccatgagtcaggaggatgccgactatttaaaggcggcccaccagtataatccggataaaacgatgccggtaatctatgcgctgaccagcaagagcatcggcatcgatccggatgtgtgcagatatgagctgaactataagctgatgggcagaaacatagcggggcagatcatccatgcgggcggggaagatgcagaggcggcccctgctaagaagcagcagatcatcatggagaacgacggattttatgagaaatcacttccgtctgccggtaagaaagagagcatctgctttctgacgatccagaatctgaccagcaaggcgattggcatgcttcttccttccttcaccagagagaccggaattgaagtgaatatgatagaggtctcctacgatgaacactataagatggctcagacctgcgtgcagaacagcccctacgacctggtccgtattgacatggcgtggatgacggagctgggcgataaaatctacagaccctttgatggctccagctcttcggttcaatggctgcggcagcagattcttccctcgctctcagaaaattactccatggttcatggcattcagtatgcatttccgctggatgcctgcgtgcagatgctgttttatcggaaggatttgtttgaggatgagctgatcaagagggaattcttcgagaaatacaaacggcgtctggagataccaaagacgtttgaagaatacaatgaggtggccagattttttaccagaaaggaaaacccggattccagaacgagatatggagcggttacttcgtacggaaggacgtttctggcggcgtgcgattttctgccgcggtttcgggaacttaagaaggatatcttcgatgcacggggaaatgtaaacattctgatccccgagatgaaacaggcagtccgcaactatctggacacgtgccggtacgcgggcagtgctgtctaccagtggtggggagagccgacgcgccagttttcagaaggcagtacggcgatgcatatcgtgttctccaactatgcttctgagatgattcacaatccggaatcgaaggtggtgggacggatcgcctacgacacggttcccggcggacagccattgtcaggcgggggctctgtgggaatctccagattcagcaaaaagtacgacgcgtgcatgagctttttgcaatggctgtaccggaaagatatagcggaaaccattacctatctcggcggatacgtctgcaaccgccagatcagtagaaatatggatatcctggagcgctatccgtggctggaaaatatggaaaaatcctttgagcccggctggagactctataagcatgaccggaacccggatttcaatgaattcctgtttgaagatatcctggggaaggcaatccggtccatcgcctcgggaattgaagggatggatgatgcgctggaaaaggcgcaggctgaatgtgaacaggcatttaaccggtaacggtttgataaaataaagagttcgacaaaataaaaaagatgctgcgaaataaattttagacaggtaggctgatatctgaaatttatttcgcagtctttttttgcttttttagatttttaggagtctctgtttcaaaggcagttttgtatggaatctggtgatagaaggaaaataacggaaaatatttgaacgtgccaatgaataaggggctaaaaacatagaagcaaaggaaaataaatactaaaatgcacaaaaaaatgtaaaatcaatgtgatatctatgtaaaatgaacaaataaatatggaaaaactattgacacgttccaataaatggtgtataaaatagatatagagacaaggaggtacggaacatgtacacaaagaatcagtcaatcagagaactcattgataagaaccggattttgattgcggctcatcgcggtacctgcggtggaaacgtggtgcagaatacctgcctggcatataagaacgcactgcttcacggagcggatatgatcgaggtagatgcgtccatgacgaccgacggagtattttatgcattccataatggggaagagcctctggaactgggcattgagcgggatatcagaacgatgtcgtcggaggaagtggagaagctttttacactgaattccctgcgccaggtatgcggacagaagctggagcgtttggaagaggtcctggagagcttccgcgggaagtgtctgattaacatcgacagatcctggttttactggaaagagatcattgctcttttagaccgcatggacatgaaagatcagattcttttgaaatccggtgtagaagaggagctcttaaaggaactggaggagagcggtaccggcattatgtatatgccgatcatgaagagcccggaagaatgggagattcttgagaagtacgagatcaatgtggccgcggcggagctcatttttacggatacggacagtgaattcttaagcccggaattcatggggcgtttgaagcgtgcaggcatcgcaccgtgggtgaatgcgattactttaaacgatgagatcgtactctcagggctgttggatgataataatgccattaagatcggtttcgatgagacatggggaaaattgacagacctgggattcgagattattcagactgattggccggcgttgttaaagggatacataacaaacaaatcaaataaaaaataggaggagcattatgaagaacttaaagaaaattgcggcactgggattatcgggagctatggtactgtcactggcggcctgcggatcagggacaaagaatacgacgacggacacgacagccgcagggacggaggcagcagcgaaaacagaagcggcaggcgatactgaggctgcggcggatacggcagcagctggcggaaacgtggacaagagccagaagctgatcatttacaccaactccggttccaacggcagagacgcatggctgaaggaaaaggcgggaacagaaggatataatgtcgaagtagtgcagattcagggcggtgacctggcaaacagaattattgcagagaagaataacccgcaggcagacctggtgttcggactgaattccatcgaatatgagaaactgaaagcggagaatgtcctggatcagtgggagccttcctgggccggagatgtggatatgacgctgggtgacaaggacggatactattatccgatcgtgattcagccgcttgtcaatatgatgaatgccgacctccagaatcctccgaaggactataccgatctggtaaatcctgagtggaaggacaaatataccatcttaaacttcggaggcggcaccggtaagaccattcttgccagcctgcttgtacgctacagagatgacagcggagaatatgggatttccgatgaaggatgggatttcgtaaagaactggattcagaacggccacatggaggtacagggagaggactacgtcggaaatgcaatctccggcacggttccgatcacagagatgtggggaagcggcgttcttcagaatcagacagagagagattataagttccagattatggttccggaggtaggcgtaccgtacgtaacagagcaggtagccatgattacggggtccaagaagcgcgatcttgcagttgatttcgctaactggtttggttcagcggaggttcaggctgagtggatgaatcagttcggcaccattccgtgccagccaaaggcggtagaggaagctccagccgatatcaaggagtttatggatcaggttcatccgcaggatatggattggggatttgttgcagcaaatattgatcagtgggttgaaaaatgtgagcttgagttcttacagtagatgacggacggcggtatggtttatgaagataaatgataccgcctctttgtaaggagaggaaaaggatgattgagtttaaacatattgagattaaatacggggattttgtagccatcagggatttgaatttaacgattggcgacggggagttctttacattcctgggaccgtcaggctgtggaaagacaacgacgttacgggctctcgttggttttctggagcccagcgcgggacagatcctgattgatggaaaagacgttacccacactccggtagagaaaagaaatatcggtatggtatttcagagctatgccttatttccgaccatgaccgtctatgagaacctggcgtttggcttaaaggtgaaaaagctttcggcggcggagattgataagaaggtcaaggatgtggcaaaggtgattgagatcaagtcagagcagctggtgagaaacgtatccgaattatccggcggccagcagcagcgtgtggcattagccagggccatcgttttggaaccgaagattctgtgtctcgatgagccactttccaatctggatgccaagctgagagtggggcttcggggagaactgaaaaagctgcagaagaatctgggaatcacgaccctgtacgttacccacgatcaggaggaggcccttaccttatccgaccggatcgctgtatttaacaacggattcgtagagcaggtggataaaccgtacaacatctataaccattccggatcggagtttgtctgtgactttatcggggagatcaacaggctgaatgcctctgtactgagtgaaatcacgacacagactggccacgcgctggatggcagcaagggcggatatgtgcgtctcgaacgaatccgtttaaatgagattccgggctatgcgaagctgcacggagtgatccgggattacgattataacggagtgatgacgaagtatcgcgtggaggtcatgggatgcgagctccgtgtgatccatgtgaacgatggacagccatttatggaaatcggccaggaactggacatctatgtaaatcccagggatatcatgcaattttaaaaggagggagtttgtatgaaacagagaagcaaaaggaaatctttcagtatacagaccctgattttaaaaattgtcattgtatgggccattgtcgcatttgttatctatccgaacttaaaccttctggtcagcgtcttctataaaaacggccagttttccacggaagtgttcggaaaggtcttcggctcagcaagggccatgaagagcctggtgaacagcttcattctggcatttaccctggtggttacggtcaacatcgtggggacgttaagcgttcttctgacggaatactgggatatcaaaggtgcaaagatattaaaacttgcgtatatgagttcgctgatctacggcggtgtcgttctggtatccggctacaaatacgtctacggggccaacggactgctgacaaagcttctggtatccgtgttcccgggcatgaaccccaactggtttgtgggatacggcgcggtcgtgtttgttatgacattttcctgtacccagaatcatatgatgtttctaaagaatgcgattcatggactggattaccacaccatagaggcggcgaaaaatatgggggcctccggaagcagaattttcttccagatcgtcatgccggtgctaaaacccactttttttgccatcaccatcctgacgttcctgacaggcctgggcgccatgtcggcgccgctgattgtcggcggggagaacttccagacgatcaaccccatgatcattacatttgccaaatccagcttctccagagaggttgcagcatttctggcggttcttctgggcattgccacgatgattctgctggcggtgttcagcaggattgaaaagggcggaaactacatatctgtctcaaagacaaaagcaaagttaaagaagcagaagatcaccaatccggtattcaatgtggctgcccatgtggttgcttacgccatgtttgccatctatgtgataccgattatcctggttatcgtttactctttctgtgattcgctgaccataaagacgggtaatctgactctgaattcgtttactcttgcgaattaccagaaactgtttacgagcgcagaagcgattaagccgtatcttgtcagcattgtatactctctgctggcggctgttctggctgtgctgatggccgtgatctgcgcccggtttgtgcgcacggcaaaacataaatatgatgtatttttcgagtggggcatgctgattccgtggctgcttccggcgactctgattgctctcggactgaccacgacctatggggagcgccagccgattctgtttaactatgttatggtagggacgctggttctgatgcttgtggggtatacggtcgtcaagctgccgttctcgtaccggatggtgaaggcggcattcttcagcatcgacaatgacctggaggaagcggcaaagtgtatgggcgcaagtacgctctatacgatgataaaagtaattcttccggtgatattccctgcgattatgtccatcattatcctgaatttcaacgggatgctgtcggactacgatttatcagtatttctgtaccatccgctgttccagcctctcggcattgtcgtgaaggcggcttcggacgagtcagcctccatcgatgccagggccatgggctttgtatatacggtcgtactgatgattctttcctccattgcactgtatttcggacagggagatgggatggaacgcatcagaagatggagacagagacggtttgagaaaaaggtggcaaggggctgagaaggagattatagaagctggaaagagattgtaggagtaagaaagagattaaaaagcaaaagaagattataacagggcgccgcatgaaagaaatcatgcggtattcctgtttttcaggaggcagagcagttgagtgattttatgatggaacaatggatttatgtagcacggcttatcggggcggcggtatgcggcgggctgatcggttacgaacggcagagcaggaagaagacggcgggagtcaggacacacgtcatcatctcggtggcggctgcgaccatgatgattatctccaagtacggcttcaatgatgttctcggcgaatacgtccgccttgacccgtcccgggtggcggccggcatcgtgacggcggttggatttatcggatcgggaatcatctttttccgcaataataatgtgagtggaatcactacctccgcaggtatttgggccacggtgggagtgggcatggccatgggctgcggcatgtatgtgctgggcgtggtatccacagctattgtaatggtttctgaagtgtttctggggcggcgggggtatttttccaggaaggcgggagaggagagagaactggagatcgagtacaaggacagcgacaaggaagatatcttttcctatatcaataagacgatagaggatgcgggctgcaggatggagaatatcaagctgaccgacgaggattctctgtgcgtactgaacgctgttttaaaagcaccggatgagctggatgcggccctgctggtgggagaactcaagaagaaaaaatcagtgaaacgggtgtctgtctgagcacgctgtgacagacaggcatgagaggggaatacatggagacagtgacaacggcattggaatatctggaaggcatcaatctggcttccatcaccctgcggattgtgatgtccatggtctgcggcggtgtgatcgggatagagcggggcaaagcacatcagccggccggaatgcggacgtatatgctggtctgcatgggcgcggccatggtcatgctgaccggacagtatatgtactaccatttccagaccggcgatccggcgagactgggggcgcaggtggtcagcggcatcggttttctgggcgcagggagcatcattatctcgggcaagacaaagataaaggggctgaccacggcagcaggactgtggacggctgcgtgtatcgggctgagtatcgggattggattctatgaggccgggatcattgcaaccctggccgtgtcgcttatcatgacgcatttgaagaagctggagtatcatctgatttttgatgacgtctggctcagtgtctatgtggaactggacgacgcggtcaaaatgacggatctggttcaggaattttcctctgtgggcctggtgatcggcgaggtccggatcgagaagaagagaaaaggctttcagaaggcggtgatcagcctgaagaatacggagcacaagagccgggaggcggtgctccggtttctggagaatgtggaggggattcagtttgtgaagtatacggcttaggaaaggtgaggcatgaggggggacagatttttgtgaagaaggagggcataagctgtttggcggcttgccctccttttgcttttcgtattcatgccctatcgtaaatcactggtattttaggaaaaaaatgtaaatttattacttaaaattgcgaaatacatcaatttagtttacaatggaatggaatttggggaggtagtatatgaaaaaaagcagtctgcagttcgaattgagtttaaaaatcagcctgttctttatcatgatcatgttggccgtcagcagtggaaccatcgcatatctgtcaaaccgttataacaaaattattattgatgacatgaacagcaatctggtgaatgcagtaaacaccatcgattattattttgatgatgtgaagacgcctatggtcatgatttccagaaacagcagtatccaaaaggtgctgaagaactatcaggggatgaccaatcgggaaaagctggatacagtgaaccagctggaagattttgttcaaaatattacaacatttaaatcctttattaatgatatcattgtggtaggggtaaatggttatctctacaatatttacagggaaagtccggataagtatattggagattatgattttcttaacagcaaatatttagctgacagcagtgcggggccagtcagacttacttatacgggtcagcatccgacggattattatatgtcttctgtcttatctgaggtttattctgtggtgcttcctatccgatctggtcagaaacggatcggttatgtgatctgcgatttaaaatctgaaaccatcaacaatattctgaataacaacttaaaagaagcgcaggccaagatcattatacaggatgaaaagggagcaattctgtatgaggaaggcaatgaggagatcctggcagaggaggtagtggatgataaaaacagatctaatgaaacggaagcttctaagaagaatatcttcgagatcctgtttgcaagaggtaattatgtgaccagtgtcacttcagaggtgactggctggacgtattattatgcagaatcctatgagaccattaacagctttctcaaaaaagtgtttatggttcatattgtgattattgcaggaatgcttgctgttatcgctttcttttctaaccagctgtccagactgatcttgaaacctttaaaaaatattgcatttatgatcagagagatgaagattaaccagggagactacaggaagaacagctacaatgcgggaggtcagaatgtgaacgagctcagcattgagattgaacagatgatcaggcgtttggagtccctgattaatgaaaattatatctatgagctgaaggctaaagacgcacagatccaggttttgacaaaccagttgtcgccgcatttcctgtataatacgctgcagctgattgagtatcagtcttatcatcatcaaacggagaatattaccaccattatcaatgggctcagctatattctgcgttactcttttcgcagcgaaagtacggtacggcttggggatgaacttcaatatatcaggtgttatttagatatctacagtttaagatatgagggcaggctgacctataagattgatgcaggtggagagagtctgcaggcagaggttccacggatgattttggaaccggtggtagaaaactgcattaagcatgggtttgcaggagaacgtaaggaagcttttattaggatatctgcagaagtggagaaacaggggctgtatatctgtgtgatggataatggaaaggggattaccggagaacggctggaagaactgcgaaggagtctggagcagatgtctgtacttagtgaacatatagggctgaacaatgtctactctatcctgaagctgcgttatggggatcgctatggacttgatatagaaagtgagccgggacagtttacgacagtgacgttacatatgccttttataaggctttagaggaaaatgggggaatggactgtgataaaagtactgctggtagatgatgaacgttatatgattgagatgttaaaagaaatcatagactgggaattttacggcttttccatcgtgggaaccgcggagaatgccagagacggcatgaatttgttttacagggagcagccagatatcattatcacggatatttgtatggatcagatatcggggattgaatttataaccagaatacgcctgattaatgcttccgtgaagattatgatactcagcgcatatgacaaatttgagtatgcgcaaaaggcagtgaagctggatgtggatggatatctactaaagcctgttaacagggaggagctgttaaacagtctgcttgaacttcagaaaaagctggaatcaggaagtcggtatcaggaagagatcagggatttaaggcattcgttggacagccttcagagaaaatatgtggaagaacagttgattcggatctatgagcatgggggagaaacagcaaaaaaggaacttgaagaagattcctactgggctgtggccagtatccgtgcaatagtccgtaatgaaattgtatttctggaacaggacatgaagagttatgatgatttagaaatatttctgctgtttgtaggagatggtctttttgcactgtttctctgcggcgaccgtgggaacaggaagtcagtgagaaaggctttggaacaaattcgtcaaaaatactgtgaacgtgacaggacactgctttgcggtgtcagtactgtagaagaggccgggtctctgccggaagcctgcagagccagcaaaagctttcttaatatgctgttttatacagaagatggaacttatctttcacatggaattatgcggggagtcagagagatggctcgtgggactgcgatcaatcaggaacagattttgttatggctggcggcgcaggaaacagagcgtttgcgtgagatgcttcggaggtggcttgacacctgtgcaaaggataatgttgaccgtgtggagactattcagaactttttgcagtgtatttttactatgaaaacctatgttcagggaagtccaaaggaaaaacagttagaaaagttgatggaggagcaaaaacagattgttcgcagctgtcagcttgaagatatttttgagagatgtttaggtgaattagatgaagaggaactacatagaaataagtcagcccttctcatcgccaatgcacagaatctgatcagaaataattgttttgacgagacattttctatagaggtactggcggattctcttaatatttcgaaaagctacctttccaaactgtataaagaggaaacgggtgaatcggtatggaattatgtgatacgggtcaggattgccagagcaaaagaactgttgatacatacggatgatacgaattatgcgatcgctaaggcaattggttattccagcgagtatcacttttccagggctttcagcaagattgtaggtgtatcaccttccgcctataaaaaactttatatggaaattcaataacacgagatcatcagacctgcttctgtgtcatcaggaattaatgcagattttaaatgcagattggaataaataataagataaggcaagaaaaagttgtttaaatcatttcctgtcaaaagctcattttctatactcttcttaaaaggaggaagacggaaatgagcttattttatgtagaaaaacagaatatttactgtgagggaaaagtagtggcagtggcggagccgctttctgggtttaaatatcgggaagactgggaagaaaaggaagagggcgtattttactggacaagaacagtgtatagcgaggaatgtgacagagaggattttgaaaccatacatatggctcttaaactggtggagccggtgagattttatatgataccaggagttctttataacggtaattcctggggggatggtctggaaccaaaaggtctggtccacgaaggagagccatgggtgtttgcttcacacagatccggtataccggctgggctgtattgtcagagcgagaaaactgcactgggaatgtgggcagagccttccagtgatttaacagcctcgtgctccttttcagaagaaaatgggaagatgactgcacggctgctatttccagaacaggaggggccggttatttactgtgcaagagatacttatgaagattgtcactatactgatccttatgtaaataagagtggcatcatcagagtgagcgcggtagtggtactgaaaaaacgttcttctgcagatggatatgattatgatgtatacctgcaaaaagcatgggagtattttaaaagagaaaaccagattataatggataagcagagtgtgtggaacttgggattttccttcattaagggcagcgcttattttgaagagaagggatttgccggtttttgcatggggctgacgtggcagtctggcggctggcggcagaagaaagactatctggagatcggctgggtgggtcagcatgcgtcactggctgtatccttgatctataaggcgttgattgacggggaaagtgcagatcttgaaaagggacttaaggtcctggatcactgggctcataatgcggtgctgcctaatgggctgttccgctgcaggtatgacaggatcttaaaatatgaaaacgagactgaaaacagagaggaaagacaggatgcggccaatctgtacagtgtcatagaggagtatttagaagcctatcacatgcttttgaatgcaggaattgacagaagcggttatctgacaatggtggaaaggctctgtgacttcattacaggtgtgcagagcgaggacggaaggctgggaaaggcctggtataatgacggtacctgttcagatcaggatggaactgcaggctgttatctggcaagcgggctgtgcagcgcttttacagagttcaagaagccggaatatatgacagcagcaagaagggcatttgagttttattacagggaatttatggaatgtggctatactacggcaggagcgctggatacctgctgcgtggataaggaatcagcaatcccgctgctggagacggctgttcgcctttatgagattgaaggaaaaagactggatttggaacgtgcagtggtggtgagccgttatctggctacctggcagtatcattatgatgtggaatttcctgataaatccatactgaggcagctggagtatcttacaagagggggaacggctgtatcggtacagcatcaccacattgattgttacggtctggttttttacgaaatatggatgaaattaaccagtctgacaggtgatcctgtatggagagaacgggcggaagctatttggaataacagcctttacaatatttcggatggacgaatggttataaatggacaaaggcggcccaaaggtgcacaggacgagggtttcctgcagaccagatggcatacgaagaaaggggattactttggtgtatcagaatggctggtagtatggcatcatgcgttcagactgaaaatactgagaaaagagtttttcgcaaaaagagtaggatatgacaaagaggaaaagaatatttggtaaagagtcaaaggttccgtcatgttcatgaagtattgggtatgttagaatttaatcagaaaacaaaagaaagaaggtatgttatgaaaaaaagattttttagtttactgctggcggcatccttacttggcgggctgacaggatgcgcagggaatcagggggaaacaaccgcagcgcaggggacagattcgacacagacggtgacggaggccgcaaaggaaaatcagagtgctgagactgcaaaggcaggagcagaaccctgcactctgacattcctttcctggtatccacaggaaaaattccagcccattttagatgcatttgaaaaagagtatccggaggttaaggtagagtttcagtatgcggctcctgtagcagattatctggaaaagatgcaggtgctgacttcgacaggtgagattccggacgtgttctatatcgcggcagagaacaaatccgagatgattaagaatgggtactgtgcagatattaccggaacagaagcggtgtccagactggtagaagtcaataagaatacttacgaagagaatggtaaggtgtatggttttgcaccgaccacatgggtaggcggatatttctataacaaagatctctttcagaagctggggctggaagctcctgcaacctgggatgagtttttaacagtatgtgaagcattgaaggcagatggtacaaggcccattatcgaacgtggtgagtggttctgggacagcttcctgggaccgtttatgaatgactatctggccggtgatttgaattaccatcaggaggtaattgaaggaacgaagacatttgccgacggttgggggccttacattgaaaaatggtatcaggatctgattcttccaggttatatcgatgaggatctggtcagtgtcagttctcaggaattttttagtgagtttgcaactggaaatgccgctatgctggctggacatgcgggccatttaaaagaagtacagaagttagatcctgaatttgagattggtttcttccctatgcctggaaccggtacagatattaaggtggtgtacggcgcggtagactgtgccatggccatcagttcggaaacaaagtatcaggagcaggcggaactgttcttaaactttattgccagagatgacatcgttcagctgtatcaggacatgaacggatatgtgattggaatgaatggcgtagagtctgatgtggatccgatcctcaaggacgttgcaggtttatactctgatggaaagattaatgtttacattcctcagggcaactgggatacgtatggcacagggcttcagcagcagctgattgcaggaagccagcagctgctgttaaaggaaattgactgcaatacatttattcaggaaatgcaggacaagttaaaagagctgaaagacgaataagcgctgtggtaatgctgcggatggagattatctttgcagtttaagatgctctgccgcagcattttccgcaatatggaggaatgtttatgcttaatcccagattttttaagaaatttacttattttattatcggcgcatttttgctgtatactgtcattctcattgtgcccattgtgctgagctttgcgtattcttttacaaactgggatgggtactcaaaacagattgattttgtaggggtgaaaaattatgtcagaatatttcggtcagaggctatgatggcagctcttggaaattcctttgtattctgtttctttaatgcggtgattatcacggctctggctatcccactgtcactgatttttcatgcaggctttcgaatcagaaacttcctgcggtctgcatttttctttgcatcagttcccagtgtactgattattggttatatcttccagctcttcttcggcccaacgaaaaatggcgtattgaatgcgctgctggccaattttggtatggagcctgtaaaatggctttctaaagggattcttcctatggtatccatcatcatagctaatgtctggagacttactggctggcatgcatgtatttatctggccagacttcaggggatatcagaagagtattatgaggcggcaaagatagacggggcgtcaggctttgacatattccgttatgtaacatttccgcttttggcgcctgccatgaccatcagtatgatgctgattatcatagatgggctgaaaatctatgcactgccttatgcgctgacaggaggcggtcccggttacagaaccacgtttatgacacagctcatcatccagacggggatcggagaaaagatggtaggaaaatcctcagcaatggcagtagtcttttttgcagtgattcttgtggtggcagtgattcagctgcggatttccagaaagagagaagaaaatttatgctgaataagaaaaaatggtcttctgcggtatggcagctcctgcttgttctctttactctggtgtttttaagtcccttgatttatatggtgcttaactcttttaaaccttacagccagatgttaaaagatccgtggggacttccgcagactttatttttagataattacataaaagcgttcaggcagatgaagtttttccagtcactctataattcggccgtaattaccattgcatctgtgttcctgattgtggtattaggggggctggcagcttatcccattaccagattcgataaccggcttaccagatttttatctgtttattttcttatcggttatatggtacctactcaggttcttattgttcagatattctctgttatgaagaaaatgcatctgatcaatacgaagacgggattgattctggtatatgcggcaggcgtgtcttttgcagtatttatgtaccaggggtttatccgttccatgccggtagatatggaggaatccgcgctgattgacggggcaaggccatggcagatgttctggaaggtggtatttccgcttttgaagccagccagtgcgacgcttatcatatttcagaccatgtggatctggaatgatttcgttctctccagcctgttcttaagttccagaaagaatttaacgctgctcctggagcttcatcagtgtatcggggagttcagcctggactggtctgtaatgcttgccattatgtgcatcgttatgctccctatgttagtgttttatctgctgatgcaaaaacagattatagccggtatgacagccggagctgtgaagggatgaatgaagaatgaaaattataaatattgaaacgtatcagatacgtccgagatggatgctggtaaaaatcagtacggatgaagggattaccgggtggggagaacccactctggagggaaaggccaccgtggtggaagaaatgattcatgtatttgcggcatggctgattggagaagatccaggcaatatcgaggcactttatcagaagatgtaccggggcggcttctaccggggcggaggtatcatgtgcagtgcgatcagcggaatcgaacaggcgctttgggatataaagggaaaaaagcttggtgttcctgtatggcagcttttaggcggcagatgcagggacagagtccgtatgtacgcccatgcagtaccgtttaaggacgatccctccagaggggaactacagtactgggtgaaaaagagagtggatgacggtttcacggcattaaagacatccatggttaatcctccgatcagacatgtggatacctggaagaaggtggaggaaatcgtcagccgaattgcggtgatgagggagactgccggaaatggtgtggatatagccattgattttcacggcagagtcagtccggccatggctcctctgctgatgaaagaactggagccttttcatcccatgtttgtagaggaaccggtgctgcccgaaaatgtggaggcaatgaaagaagtaagcgggaagaccgttattcccatagccgcaggagaacggctgtttactacattcggattcagggaactggtcgataaaagggcagtccatattgtgcagccggatttatgccactgcggaggaatcctgcagggacttaagattgcagccatggcagcgaatcagtatatatctgttgcgcctcataaccctcttgggccggtggccctggcagcctgtcttcagctggatacagcgatatccaattttacagcgcaggagcaccccacccatgaggaaaaattggatttaggcgtgggtctgttaaaaaatccatttgtcataaaggatggatatatcgaagtaccggaaggccccggactcggtatcgatgtggatgagtatgcagtgaaggagcttaagtataacggtgactgggcaaatccagttctgtattttgaggatgatcattctatgggagagtggtagaaggaggagctatgagccggtttgtgacagttggagagactatggtggctctcgttccaaaggaacagggacttttgcggtatggaccggatttttccatgcgaatcgcaggtgcagagagcaatactgccataggattaagccgtcttggacatacatcatcgttcattaccagaataggaaatgacggatttggagatttcctgattcggatggtcagggcggaaggggtggatacatccgggattactgtagataaagaccacaggacgggggtaatgtttaaggaaatacggcccaatatggaaacagcagttcattactaccgggacaattctgctgcctcctgcttgtgtaccggagatgtcgatgaggctgtaatacaaaaggcagatatggtgcatctgacgggtattacacctgtattgagcaagaactgccggcagatggtctatgacgttatggatatggcggtagaaggaaaaaccctgataagttttgatccaaatatcagaaagaaactctggaaggatgaagaatttcggccgatgatgaaggaactcataaacaaaagttcctgtgtgatgatgggactcgaagaagggctgtttctttatggaacaaaagatgtgaagcggttggctgatatgctttttaaagggggaaggcttcgttatctggcagtaaaaaacggggcggaaggcgcctggatatgtgatgaccagcatctgtttcacattccgccatggcgctgccgctgtgtagatccggtgggggccggagatgcttttaatgccggatttatcgcgggaattcttcaacagggagagcttgagaaatgtggaaaaatgggggctgttgcaggcgctatggccacacagacatatggggatatcgagggacttatatcagcaggagatctggaaatgacgctgaatcatgaaacatgtgtactcagatagataggggagaaggagggactggtttgagagaaagaaagaatgattcgattcaggtgaacggggatttgatggaagcgattatttccagacacaaagtcattgcgatcctgcgtaatgttccggagaaagagcttcaggcatatgtggaaagtctttatgaaggcggaatacgggcttttgaagtgtcgtttactacagaacatgcaggaaatcagatagattatataaaacagaagctgccgggagattcttcagtgggagcaggaactgtgcttaacgaacgggaggcaagagaagcagaggccgcaggtgcagattttatgctgtcgccttctgtctgtcagaaggtgatggaatactgtgcaaaacaaaagattgcatacatgcctggtgtattgaccccatctgatgtgagtctgagtctgtcttatggatttcatgtcttgaagctgtttcctgccaatgttttttctgttagctatcgaaacagcttaaaggggccgtttccacaggcagagtttgtggcagtgggaggagttagcttaaagaatgcgtctgaatatttgaaaaatggatttgtgggagttggtataggcagttctctggtgaaggaggagttgcttctgggcaagagatgggagatggttgcctctgatatcaaagtacagcttgagcgtttgagaaaggaggggctgctttgaaaattgttgggatacatacctggttggttaggccaagatggtgctttgtggaaatacttacggatgaaggaatatccggctggggggaggctgtaatagagggaaaggctgctacagtaaaagcgtgtgtagaggaaatgaaagagtatttaacaggtgagaatcctttacatatagaggatatctggaatctgctgtaccgcggcgcattctaccgcggaggtcctgtgcttatgagtgccatagcaggaatagatcaggctttgtgggatatcaagggaaaataccacggagttccggcatatgagcttatgggaggcccctgccgcaatagcatgaaggtctattcctggattggaggggaccgtccggcggatgtgggaaaagcagccagagcgcgaaaggaagcaggctttacagcaataaagatgaatgcgaccgaagaactacagtacatagacagctatgagaaggtggatgcagtactggaacgagtggcttctatccgggaagagacaggaaaatattttggtattgccattgactttcatggaagggttcataaaccaatggctaagatactggctaaaaagctggaggaatatgatcccatgtttttagaggaacccgtgctgtgcgagcagatggaagactttaaagagatcgcggcctgctgcagtattccaattgctactggtgaacgtctctacagcagatgggattataaacagctgtttcaatctggtggaatttcgattatacagcctgatttgtcgcatgcaggagggctgacagaggtgagaaagatcgcttccatggcagaggcctacgatgtagcgttagctcctcattgtccgcttggtcccattgccctgtctgcctgtctgcaggtggatgcagtctgctacaatgcagtcattcaggaacagagtataggaattcattataacgtgggaaaaagtgttctggattatgtacacaatcgggaagatttcacgtttgaagatggatatgtgaatctgccgcaaaagccggggcttggagttttggtaaacagagaactggttgaggaagaaaataggacacctcatcactggaaaaatccggtgtggcgccatagggatggcagtgtggcggaatggtaactggcatctatcacaaagaaaatctggtataaattccaaaagagtgcagttttatagtcgattaacgcctacaaagctgcacttttatatgttgttataagaaagtcttcctgaaagactctttaaaactcacagccattccccaaaccttcgaatataaatccccttaaaaaactgcgttgacaggcagtaccccgcaagaagaagtaccagccatggcagaaatccaagaggcaggggagccatatccaggccggaggccattgcggagaaactcaccagaatggctgacagggcaacgaccgcggttgataagagcagcggctttgcggccaagctctgtataaatgggattttcccgctgcgtatcatgtgaatgaccagaacctgggatacggttccgaatacgaaccagccacattgaaaaagcggagccagttccggcgtatttgccttgataatccaccacatgactgcaaaacagaggatgtcaaagacggagctcagcggccccataaaggccatgaaggatttgatggaccgggtttcccactttcgcggcttttgtaagtattccggatctacattgtcaaagggaatccccatctgcgaaaaatcacaaagcagattttgggtcaaaatctgaactggcagcatgggaaggaaggggaggaatatggaagcggcaatcaccgatatcatatttccaaaattgccggaagccgccattttaatatatttgacgatattcccaaaggtcctgcgcccggctaccacgcctttttccaataccatcaggtcttttttcaacaaaatgatatctgcggtttccttcgctatatctacagcggtgtctacggaaatgcctacgtccgcctggtgaagcggcggcgcatcattaattccgtctcccatatatccaactgtgtgcccgttggcctgaatcgctttcactacccgctctttttgggaaggagacagcttcgcaaagatactgcagtgttccacagactctgacagtgcagcgtcatccatggcctccacttcttttcccgtgagatagcgggaagtctccacacccaccttactgcatactttgacagcgacgccttcgctgtcgcctgtcagaacaaccgtccgtacgccgtggttatccagggctgtgactgccgcctttgcactttccttgggcgggtccagaaaccctacaaaaccgatcagtaccaggtcccgctcatcgtctacgctcaattccacaccggccacatcgtttttctgtgccaccgcaatcatccggagaccgtccctgttgtgctgttcgcagacagcctgaaccttctgcaaaagagtttcatccagctccaggatctgcccgttccattcggcgtaggaacagattgccagcatttcctccacggctcccttggttaccagctgctgtttgccgttctggtcttccaggagcacactcattctgcggcgggagaagtcaaaggggatctcatccaaccgggtgtagctgtttaagactgcctcaatcccgttttcatgagcgcggtttatgatggctaagtcaagcagatttttaaggcccgtctggaaatagctgttgagaaatgcatgacgaagtgtacggttatcgtcctcacctactgcgttcatgtatttttccagaataattttgtcttccgttaaggtgccggttttatcggtgcagagtacatccatctcgccaaaggtctgtatggctcccagggttttgacgataacctgatgctttgacatgagaacagcccctttcgccagtgtggaagtcatgatgaccggcagcatctccggtgtcaggcccacggcgatcgtgatggaaaacagaagcgcatcgccccaatccccctttgtaaagccgttaatcagcagtacgacgggcaccatgacaagcatgagccggatcaaaaggctgctgacggaatcgacaccccgttcaaaactgttttttgcccggtctccggaaagggacttcgccatggagccaaaatacgtttcattgtttgtggccaggacgatgccgactgcactgccgcttaccatgttggtgcccataaagccgatattctgaaggtcggtcagcgcgtcttccctgtctgagcggatatccgcatacttttctaccggattcgtttccccggtaagggagccctgagcgacaaaggcgtctttcgtgaaaataaagcggatatcggcaggaatcatatcgccggcggaaagccgtaccatatctccgggaacgacgtcctcaatgggaatttctgtctgagctccatcgcgcagaacgtcggccttgttggaaatcatcttcgaaagcttttctgccgccgagttggagcgttcaccctggataaatgcgaccaggctggagatgattaccaaaaacaggatgatgcacacggtaacgtaatccggctgctgggaataaatgacatctgtaaacagcgttattacagcgatgataagcagcacaatattgaagggattgacaaccgcatttaccagacggtgaagtgtggtattactctgaccggtcgtaatgatattttttccatattcctcctgaagctgctccgcctgctttgcggtcagcccggagccggagacggaaaaatggtcatataagtcatttaaatcaagaaatgcaaagttacgaagaagtttttcgctttcattttgtttctgctgaatctgagagtttcttttttggattctgaaaatgttctgattgagtttcatagggtaaactcctttccataatagagttcccataaaacaacatagaatccggccggatttccgctcaggagcgcggcagccagagcggccacatttccttaacatggagtgcgtaccctgcctggaaagcttttttatgcagcgggagcacctttcctgttacacaaaaaaaccaccccgaaaggcggcacaaaagaaacgacagatccatccattcctataaaagcacaatagacggccggtcgcatctaatggtacctgcgcggtttatgttgtaatatgagattttgaagacgtttttacgacttcgagggttgccgtccattgtttcacctccctgtaacatagactggacatattgaagtggctacgcccatcatagcattctgggcgtgatgtgtcaacagcgtgttataaagaagcatccgataagaaaaaggatgccaaacatccgttcttgcgttataatggtttctaggtaatgcaggaggaagagaattatggatatcaatgatctgattatttacagaagaaccatgccggagcggagtgcccgttatgccggcttcccggcggagcttccggaggaactgcgggaatatctgcagaaaaacggggtgagagggctttatatccatcaggcggagatgtttttaaggtcgttgaaacgggagaacgtggtgattaccacatctacggccagcggaaagacgctgggctttctgcttcctgtcatcgaggagattttaaggaatccgctgtcgcgggcggtcttcatctatccgacgaaggcactggcaagcgaccagtaccgcgcgatcctgccatacattgaatatttcggaaaaaaccggatttctgcgggagtttacgacggcgatacgcctgcgggcgagaggagccggatccggaaagaagcaaatattattctgaccaacccggagatggtgaatggggcatttttgccgaatcacagtaaattcggattcgattttatttttacaaatctgaagtttgtcgtcatcgatgagcttcacacctacagaggcgtgtttggatcccatctggccaatgtattccgccggcttcaccgggtgtgccgctattacggttcatcaccggtctttctgtgcagttcggccaccattgccaatcccgtcgaactggcggaagagatctgcggaagaaaattcgtgcggatcgagcgggatggctctcctgcggcagagcggacctaccttctgataaagcctccgaagattctggggcacgataaaaagtactacggacaggtgcaggccacggcggtggcggcggagctgatcccggaactggtggaacagagaaagaattttattgcatttgcccgctcccgaagaaatgtggaggtaattctaaaggaggcgagggaccgtctcgaagcggaatgtccggccagtgcgtcccaggcagataaaatatccggttaccggggcggttacacgcctgcggagcgtaaggagattgagcacaagatggtgacgggggcgctgtgcggactggtgtcgaccaatgcgctggagcttggaatcgatatcggtaagattgatgccaccgtgctggccggttatccgggaacgagggcttccttctggcagcagacaggccgggccggaagaagcggccgggcgtgcaccaattatctgattcttgacagccagcctttcgatcagtacatcggaacgaatccgggatggctgttcgaaaacagcagtgagagcgctgtcgtagacaagaacaaccttttaattgaactttcccacatcagggcggctgcggcagagattcccctgacgcttgatgacgcctctgtctttccggatctgggcgagacgattccggtcctgatgcgggcaaaggagctgaccgggcagaacggcaaattcgtgtggtcgggcggttccttcccggcaggagattacagcctgcgtaatattgaccccaaccggtacaagctgctcttaaaggacagcggaaaagagatcacggagatggatgagatgcaggcgttccgcgagattcaccccggagccgtctatttacacggcggcgttcagtaccaggtggtgacgctggatctggagacaaggacagcccgtgccgtaccgtttaatggaaattactatacgacgcccatggggaatacggatatcacgatcattcacggcaggaaagagaagccgtggaaacgaatagatgtggtgttcggtgatgtaaatgtcaacgcgcaggtttccctgtaccgcaagctgcagtttcataatcatcagaatctgggctatgaacagattaacccttcgttatccagagaattcgaaacggagagcgtctggctgaagctcccgggtaatgtggtaacggcctaccgccgtctgctgcagaagagcccaaacgggcagatgatccgaaacaatcattttgaggggctgtgctgcgccatccgaaacgcagcgcgcctggtaacgatgacggagcaggaggacatcggtacgactgtcagcactaacgctgtgtatgcagaaaaaagcgttgaggagtccgtatttctctttctctatgatcagtataccggcggtcttggatatgccgagaaagcgtacgaactgattccggagattatagaaaatggtatcaccatggtgagcagctgtccctgcgaggacggctgtgccgcctgtgtcggtgactaccatctcgataaaagtatggttctgtggggacttaggaatatgctggaggagtctgaagtgccgaaacatgtgaaaatggcgccgtacggcccatcgacatttatacagaagccatttcggtttgacgagctggaagcgcagtggaaggcatttacctccatgctgctgaaaaacggggaacccttcgcctcctttttaaatacggtgaccggggtcagaacggaagagagaagacttgccctgattacggaccagccattttaccgggaatggattatggaggagactaaccggaaggcccttcataatctgatttcctattatacggacgcgccggtgggatttgaactggaggtggagattcggaagaagggggaaaacagaaggaacggctgtgatatggggagtggaacagccggtgaaaaagccggcaacagcggtgagggaagcactggaatcgaaagtgacggatttggcagcagtgaagacgatggcgatatgcgaagaaagctcgaacagagacttgataagcttaaaaagaaggagaattaggtggactgggaaagagaatgggaacggctgaacctttatcagcgggaagcggtcatcaatgaaaatacggcctgtcttgtgagtgcgaatgtgggaagcggaaaaacgacggtgctgaccgcaaaaattctgtatctccatgaggtgaagcatgtgagttaccggaatataatggtgcttacatttacaaacagggcggcggctgaaatccgggagcggcttgtgagtgcggacccggcagtgactccggaggagacggaaaacttcgggacgtttcacggcgtggctctggggcttctgaaaaaaaggcttccagtggagaacctgggatatacgaaggacttcatggtgatggagccggatgaggaactggaactggcccatgcgctgattgcggagaagaaactgaagataaagtacaaaaaccggctgagaaagcggctgtcggaagcggagcgtgtatcggcggcgggagctgccggcggtcaggatgatctggtaatcctggcaggacttctcacagaggaaaaaatcaggcgaaataagatgacattttcggatctgatgaaaaatgcctgccttttgatggcggaagtgaggtgggagaatggatttagcgaagagaatgaatgcagcaggaatattcaatgggtgattgttgatgaagtgcaggactgtgatgggaaacagctggagtttatcgactgttttatgacagggggagcgaagttgtttgcggtcggggatccaaatcaggtgatctacagctggcgaggaagcgcgtttaatctgttttatacgttgaagacgcggtatcaggcggcagaactttcactgccggttaattaccggtccagcaatgagattttggaggcggcccggtgttttcagcagaacggaggtacactggaaggtacaagaggcggaggagagaagattgtggtgaagaatcactacaactcctttcaggaggcgtgttatctggctgaccggatctgtgaactgcagaaacaggggattccttttgacgaaattgccatattctatcgcttacagagtcagtctaaggtgctggaggacgtattctcaaagaatgaaattccatatgaagtggccgttaagacggggatccatgaaattcctgtgctggaatggctcctgcggcttctgcgattcctggcggatccggctgaccgcgctgctgcggttttcgttctgagcagccgggaatacggtgtggggatttctgcaaagaaggcggaaaaactggctgaggaaagttgtgcatgggtgtgtgggcggaaggaagctcaagagaacggatcagaaaaagcagcggcgcccggacttttcgaaagaatggtttcgtttgcctggaatggcgctgagatagaggatacaaatgggttttatgaatattttgacctggattgttcactgaaacccaatgcgtcgtcttatggagaggataaggcaaatgtctgtcatttcctggaccgtatgtttacatttatgaaggtgaaagggttcagtcttccggaaggacttcgggaatttttaaattcagcggcactgtacgggacctcccgggaactgcttcctgagacagacggcgccggggagaaccgcgtgaaaatgatgacgctccatgcttcaaaggggcttgagttttcccatgtctttatcattggtgtgaattatggcctgattcctttgcgaacgaaagggctggacagtgaggacgaggaaaggaggctgtttttcgtcggaattacacgggcaagaaattatctggagctttcctggtataccaatcccgacatcttcggtgtgatggccggggaaagccgctatatccggatgatcccgtcagaactggtgaaggggcaggagtcggagatgaggacgggaacagccaatttgcaggagctgcggagacaggtgcagatggcgaaggaaaatggcgagaagatggcagacagggaggacgtgaagaaaaaagatgagatggaggaatggggggaagcgggagaattgaaggaaacggaggcggaaacaccgtacatggaatctgtgtctgtctctgaatctgcttctacctctgccgaaatacgggttcgccatgaaacatacggatacggtaaagtggttgaagaagatgacacaatgattaccgtagaatttgacggatacggaagaaaagaatttatcaaggcattcagctgtctggaaatgctgagtgaacaatagggaggaattttgatgaactattacgctggaatggacataggcgggacaaacggaagattaaagctgaaagacgggggcggaaatattcttggggaatttaccgggccgggctgcagcatgaatacggacggatacgataagagccggacccgctgccgggaactggtgcttccggcactgaaggaactaggactgaatccatcggactgtatgggtatttgcgtggcggcaagcggaattgattcaccgggatatgagaagatgtgccgggatatttttgaagaaatgggatttaagtccgactgtatccgggcagtcaatgactgtgaggtcttcctgtatctgaaggagggaccgtcgatggtggtggtatccggtaccggttctatctgctatggaatcgatgcgaagggtactatatcaagaactggaggctggaatcatatcttaagcgatgagggcagcgcattttatctggggctgcagaccatgagacttgcggcagaggatctggatgagaggacgaaatgtccgtatcttacccggaggtttatggaaacgagcggcctggatacgctggaaaagattgatttgttcgtgaatgagcatttgtttgataagccggaaatcgcccgattttccatgattgcctatgaggccgccaaacagggggattcacaggcggaaggaattcttaaggattgtgcggagaaactatggaaactgattgaagacaccgcccgtaaggccggctggaccaggcaaagccaggtgtccactgacagtgggaaggaaacacgtcatctgtggctgtggggcagtgttctggttaaaaatgagataatcagagacgaagtggtaaaaagggtgagacaggccatgccggatatcattgttgctgttccggagacgagtgcgttagatttggctttgatgcttgcgggaaaggttctataatagctccatagtgagataccaggcaagtaaattgaaaagaaagaatagaggcagaaggacaacttcgagagaagtggccttctgcctctatatgttgaagtgtatattaaagaggaaacaagcgaggttttcaaagtgcttgtttaaaccattgtggtagccgaaccttcatttcattcatataatttgtgacttgctcatcggaaaatgtctggtacggtggatagagtctcattgggaattctggtataaaggatttcacatagagtttatcataggcagcattaataaccggggttccacaagttttaaatagtatttcctgtgagagcgttacttctttttccagttccgtgattgtattaatgtctttattaataccagcctcatacagtttccaggcggtaggaaggtgggtggcaatgctggaaaaaagcatgctgcattctccatagaggcaccctaaaccgtatccgtattcacttaatacaaactgtatgggagtatcggcgcggactacatttatgatatcctccagagaatcattcataaatttcacggctgccagattcgggatttcatcagctagtttgatataatcgtttgccttaaggagtttcttggaacggcctccgttattgtaatgcatgaagtgacagtcaggaaaacagtcgcagacatcgtggaagaaaacaagcacttcttcgtctgtcagagcaccccatgaaggaaacgaaatttgaaaatcgcggatgcccagttcataggcaatatttaaacggttgatcatttcagcctgagatagactgatcacaccggtgatgggcgtcacatccgtgttttttaattcgtctgcaaaaacagtggtgatttcagtaaacatttcatcgtcaacaccatatccttctcctgcggtaccaaatgtatatatgtatttcaaaccgccgttaacgagagctctgacccccttacgaaatagtggttcgtcgagcgtaaaatcttcacgccacggaatgagtgcggctcctaatgccattctgggatagcgcttttccatgattataaacctccttcaaatataattaacagtattttgtggtagcgtctttaattaaatgttcgcattcatcaactttgggtatatcatctgatgtgagcggcgtgagcggaaggcggactgaccctatatttaggccatttcgtttcaagatttctttgataaccgcatacatatttcctttacatgcacacatggtataaatgatctgattaatatcatattgaatctctcgtgccattactaaattgttgtttcttaaatattcgtcggccttcaaaaagagctgaggcatgactccatatgtcccgccgattgcgccttctgcgcctataatgcgtccactgatgaactgttcatcaggtccattaaaaacaatacaattatttccaccttctgccttaaacatctgaatatcctgtaccggcatagaagaatttttaacccctatgacgcgtggatttttgcgcatctctcggaataaagaaggtgtaagagaaacccctgcaagttgggggatattgtaaataataaaatctgtgagaggagcggcacttgagatatcattccagtattgggcaattccatattctggaagatggaaatatatgggtgggatagaggcgatcgcatcgacacccagactttctgcatgtgcagcaagctccatactatcagctgtattgttacaggcgacatgcgcaataatagtcaaacgtccgtttgcttccgctacaacattttccagcactgtttttcgttcttctttgctctgataaatgcattctccagatgaaccacatacgtaagtaccttttacaccagcatcgatgagatagcgggttaaagcgcgaactcgttttgggcttatattcccgtcatcatcatagcaggcataaaaagcagggatgacaccatggtactttgctaaattattcattttaaatcctcctatttgtttaagcctctgatgaggcaatttttcagataaatacttttttcaggcgattaagcgcttctatgagcaggcttcgagggcatgcgtaatttaagcggatgaaggagtcaccgccattgataaagtcggttcctctggttatggcgacatgagcttcatacacacatttttcaatgatggtgtctggtgacatcccagacatagaaaagtcaatccataaaaagtatgtagcctccggaagatatgcatgtgccacagggatatgtttattaatgtaggcgaccgcaaaacgtgcattctccagtaaatagttttgcagattattgacccacaattcaccatgttcataggcaccgatcagtgcctcaattcccagtgtgttttttacttttaaaccggaagccagaattgcctgattaaaacgattgcgaagaaaatcgtttttgatgacagcaaaagctgtgcataaaccggcaatattaaaagttttggtgggagaataaagagcaattgcaatttcttttgcgtaactgttggcggtaaagatcgtagtaaatgggtttgaaagtgtcatatcagcatgaatttcatctgaaattagaaaaacatgatgacgaaaacagagttcaactagcctggaaagctccccgactgtccagatgcgcccggtaggattatgaggagagcaaaaaagaatcatctttacttgttcagctaatattttttcttcaataagatcaaagtccaattcgtaatgatcttcggtctttttcataggacagatgatcagtcttctttcgttaaaggttactgcattgtaaaaagcatgatatccaggagtaggaactaagatggaatcgcccttttccgttaatccctggacagccattgcaacacctccaagtacactggatactggaattatctcatttttcgaaatgtctgcaccataccgttttttttgccagtcggtgatgctgttccaataagcttctggcaactgcatataaccaaatatgggatggtttaaccgttttgttaaggcgtctgttactgccggagggcaggcgaagtccatgtcagctacccacattggaattacgtcatccgtctgtatattgtaggggatggcatcccatttactgcaatctgtaccgcgtcggttaattacaacatcaaatggaatatagttcattttatatcctccttgtctgatagaccgtttcctgtttttagaataacataaaaataacaaatgtcaataattttttttattttaaaatataaataaaatatttttttattttgttgacatattgttctaaaaagaatataatacaatcaaaacaaatgtaaataatacacaaaaaagagacggaggttattcagtgaaaaagaaaaaaacacatctcaacagtccttatacaggatacctttttatacttccacaatttctgttttttgcagtattcacaatttatccggtatttgaaggggtacggatcagtctttataaaactactgcagtacagaatacttttgtagggctaaataattatattactttatttcaggattcggtttttataagaagtgtgtttaatacgttgtttcttgttgttgttgtgacagtgtgtatgctgctgtttgggatgctgatatctgtggctatttttgataaaaattcaaaatatatagctgtggtccgtagttgctattatctacctgttattgtttcaacagttgtaatgagtatggtatggaaatttttattaaatccagccaatggccttattaattatctgttaaaaaaggcgggagctaatgttacgaatccactcggaaatcctggtacagtactgtgggtgattgcatttgtgacgattgtggccagtgtcgggcaggcaattatcatgtacgtggccagtatgggaggtatctccggtgatattttggaggcagcagaagtggatggcgcaagcaagttccagagaacaatacatataatacttccccttacaaagccaacgacgctatatctttctgtcacaagtgtaatctccatgctgaaactgtttgttattattcagttgttaactgatggtggacctaacaattcatctatgacaatgatgtattatttataccggaatgctttttcttatgataagaagaatattgctgcggcagtcggagtattgatgttcattcttgcagttgtaatggcaattccacagtttaggtctatgagcggaaacggaggaaaaaagagatgaacaaaaaaataaagcatatggagccttttgattttgtattaaatattttagtttgctttatgggtattttaaatctttttcctttttattggctggtaaccagttcttttaaaacatctgccggaatttttaagatgccgccggaatggtttccttctacatttcactacaaaaattatattgatctttttgtggggcagccagcctttcgctgggcttttaatagtattttggtatcagtggtgacgactgctttggtagttgtctgctcctcactggcggcgtatgctatatcaaaattggaatttagatggaagaatgttatatttgtcatattcattggagcgttgatgattcccaaagaaatttttattgttccccttttccagatcatcttaaagttccatttgagtgacagctatatggggatgattcttcctaatgttgcgactacatttggagtatttttattaaaaggcttttttgatacagttccggattctattcgggaatccgggagacttgatggggccagagaactgactatctttaccagattggttataccgattgtgaagccgggaataggtgctttatttattttgaatttcgtaaatgtatggaatgattatctttggcagatgcttattgcacgtagtaagaatatgatgaccttaatggttggaactgcgagtatcatgcaggaaatcagtcccaattatgcgtataaaatggcgggggccactgttgcaagcctgccaatgctgttgatatttatttttttccagcgttattttacgaaaggaattaccatgggagctgtaaaggaatgatttacaagtgatattcaggcccaattatggggctgagatataaataaaaggaggaaatatttctatgaaaaaggcattatcaattatgatggcatcatcaatggtgttgtcgctggccgcatgcagtggatcagctacgtcccccacaactgtggcaccagagccttcaaagtcagctgcagaggaatctaaggcgaaagaaacgactaaggctgctgtttcgggggaacgtatggaacttacagtctggttgacacccagctggaaaggggtttttagtggtgatgaaccgggggcagactatgacagtttctttgtggaggctggaaagcggtatacggaaaacgtaaatcctaatgtgacagttaaagtggaagtgattccgggagacagccgtgatgagaagcttaatgttgcggagtcaacgaacacgcttccagatatcgtatacgaaggtgcatttaccatgtcatcgtattatcataaaggatccattgttacgttggatgatattgttaatgaagatgataaaaaggatattgcagaaggaatttgggagaactgtatggtagaagataaaacgtttattttcccgtttgcacatatgccaggcactcttgtgtataatgcagatatgtttagagaggctggattagaggataaaattgcgggagaatatgaaattgccacatggagtccggatgaattgaaagaaattctgaaaaagttgaaagaagaaaaaaaggatgtatatccaatgtccttgtttgccatgaataatcaaggggatacatggaatctcacatggctccgaatgtttggaaataaattctatggtgatgatgggcatcttgttgttaatgaagaatcgggagtgagggctttgcaatatcttctggatctttacaatgaaggactgactgtaccgggagcagagtctcttacgtcgaacgactgtaatgcaatgtttcagaataagcaaattgctgtaagctttaccaatagtacattatttacgaatctccagactgatatggcaaatggcacaatagaaccatttgatgcacggcttgcaaacatacctggcgatccaaatcccaattcctttacatatgtttctggctttatggctatgaatacaggaaatgagaataagatagcagcagctaaggatttcattaactatgtctgccatgatccggaattagtactggcatctaaaaatacacttccagtacgtgaaacggtaacgaagcaggtatcaggagaacttccatttttgcctgcatatacagaaaatgcaaagtatatttataatttttccaataatattcctggatataatgaactgcgtaatgtacttttccccgaacttcaggctgcattaacaggtcagaagacggcccaggaagctctcaacagctatgtggaaaaaggaaatgtaattattgatgagggtcgtgcaaactcggttatatacaattaataacttttgcctgttctgcttgcatgaacgacggccgcagattatactaaatctgtggccgtttacaaaaatttccaaaaagaaaggagataccttaatgagttataatgaggttcccaatcgcatagctgaaaaatacagcaaaatgacaaaatcagaaaagaggatcgcagattattttctggaacaaaaaagggatctgcagctgacatctatcacggaactggcagagcaatgcagtgtagctgacagtacaatttttcgcttttgtaaaatgctgggatataatggctataatgattttaagattgctatagctaaggagcagggacgggtacaaggaacaagtgatgcggaaggtaaagaatttgatatatatagtagtataacaacggaggatgatataccgacgaccgggcagaaactggctgctatgtattctgcagcacttgaacagacgcaggaattactgaggcctacaagtgtagaaatggcagcccatattttgctgcagtcggaacgagtgtattgttttggtcagggaggaagcttaattacggctatggaagcatgggtacgtttcagtgcggtagccagacattttgagacgatacaggatacatatcttcaggtgatttcagcgactttattgactgaaaaagatactatatggtttttttcatactcgggatcaactaaggatatggctgatatacttggtcaggctcgtcaacggggggctaaggtcattgtggtaacccgatatgcaaaatcaccagcaacaaaatatgcagatgtggtattgatttgcggatcgaatgaaagtcctttgcagtcaggatcaattgttgcgaaggtttctcaattatttgttattgatatggtgtatcaggaatatatcagaatggcacccgaagagtgtgagaacaatcgaaatcttacaagtcaggcggtagcaaatcgtctattatagtctaagttacatctacattaccagagacgataaagttaatatttaataataaatgtaaaagtttatttgtaaagtagagtcaggcgtgttatgcagtaaggaggaggaacgtgcaggaagattttttggccatcataaacgatagatatgatcgattgacaaagaccgaaaagaaagtagctgattttgttcttaaatgtccgcgaaaagttttgtttatgtccattatggatttgtctgaatgttgtggtgtcagtgatacaagcgtattccgtttctgccaaaaaatgaacctggaagggattcgggagtttaaagtgagactatcgttaagccttcgggataaacagttggagaatgaagcgtgggaaaataagattgatttcaacgcttcatttatgtcattgtctcgtaatattctgaatatcaatttaggtatgctgcgtcaaacttctgaactgttaaataaaagttatatcagcgctgtcagccgagctttccataaggcagggagagtctgtttttttggtgtaggagctgatttgatgacggccatgagtgccgccggtacctttcaaagaattggtgtaaaagcatactatgtagaggcaacacatatgcagatgatggcagcttctgcaatgaaaaaagaggaggtggcagtgatattttccagtacaagggcggagcgggatattttgcaaattgcggaacaggcaaagctgaacgaagcatttttgatttgtattacttcatttataaaatcgtcactgaccgcacttgcagatttggtactgcctgttcatatgtataaagagcaattgtccgacggggtcatatctccggaaatcaatcaatattttttggtgaacctaatttacgcggagtattatcgtacatactttgagagagccagtatgaaagaggatgagatatgcgcctctgtattggagaaaatatgctgaatagagaagtttgaatctattcgggaaagatgtggatccctggtgtggaaaataaaaaattgtatgtatgttaaatgaaattttttctgcatagaatgtaacttatgaattaaaaaatctgttccctataatatagtgaggagaacagatttttttaattccgcctaaaaccagtgaaactacgattatactctaacgttaaatttcagtatctgttcttataaatgattcggagtaagcaaaggcgtatagacctccctgctcccattcatctcaataagcacagagtgtgccgggatttcaatattctcatactgataagaggaatcaccgaaattagccactgcagccacgaccgcatcttcgctgcccccgaacacagttttctgcacgctgccatcctcgctcttatattcgaaaccggtcatttccttggtgacagccgtttggctgaagtccgaccagacggtttgatggcggagaatgtcatctttataatctgaccattccactgcatccaggtgataaagcggtggaacgttgtacagaatttcccgtatcatacgatccgcggttgctcctttaattttaaaggtcgaccagtcccagtggtagctggtgatgacagaatcattgtagacgagcttgaaaaggggggtgtcgtatttcgggtccacaaagatggtatggtactgttcttttaccggaatccgtttggaaaaatgctctgcggctccgccgttcgggttgtaatactttccaatataatagtcgctgtcccgattctttttcatgtcctcatccatccaggcaaatgtctttaattctatcccatgggcgtatgcgatatcagaggccgcgaaatcattgccgccctccgagccgatgacgagatggtactggtctctgatgtaagacatacgttccagcctggcagcaaggtcttcctcctgtgtggtgatatgagaaggcgtgtaatcatcatagatctctccggttgcgtcacagtcgataaaccaggagttaaacggcagctggttggacataatggtttccatacggtttttgacggcaggaagagacagggcgggatttaatttgcggccgacgttctgaaagccgctttccggtttgccgttctgatcccttatgacagagttttcatacagggattgatcatcaaactgagcggtaatccactgctccctgcccggttcgtgaatcgaatggtaagagtcgtagctggcgatgagataatcctggctgaccgcagtttcgaccagctccggttttacatacgcctgttcccagctgtttaagccgatccatgcatggtcgatgccgccttccttcatttcctgaagcagagttaccgtctgggaatccatccactgtccggcatcggcaaatacttccggtaaatttgccgcgacagcatatttgtgaacctgaatccgttccgtttcacttaaattatcatatccttttgccaggagaacctctaactctgaagaactctgagtaaagacagagggctcccagaaatcgtcccgcttcaaaagctggctgatgtagctgcagattacatttttctgatattctgccacgtagtcctggccctgtatttccttcaggacagctgtaaattcctgaccattttccaggcgtccggcaaatgacagaaaatattccatggccggagaggaaagggacgttcgcaatgcctgccagttgatatcatccgctgatatggcgaaatctccccaaagatagatgaaaggagcaccgtacagcttacggatattgggatttgtctccgctttctgttccagggtggtaaattgtccctgctcgattacgtaattgcgatacagcttggctgcgctgacaggatccttgtccgtgatgtaaattcgaaatctgtttgtccggttatcatcgatcgccggatactgatgggaaacagagaacgcgatgggggaatccgacgtaaaattcatctgtgtccggtaaggatcttccataacaaacaggaggttgtagcctccggcggatgagatccagaacggcatggaaagctgctccatcacctgaaattccccgccatttaaataatcggaccaggccggatcgtccgcaggtacccgtttgccttcgccaaagggaaaatagtaggtatctgcggagataacgggccatgtaaaggaattgtcgttctcattttccgaggtaatctctacacttaaatagtccttttcgggagtcagggaaactgatatctgttcatcgggatagcgccagctgacagtatctccgacttttccatagtccagtacggttcttcgttcccccttagcagctgccgttataagcgtctgttccacctcaaaggtcagagtaaattcttccggctctgcctcaaaatcaaagggaagtccggtatactgggattcaaagacctccgtttccaccgggacggccgcagatgacggttccggattctggctgttggacgcacagccggttagaaccagggccaatggcagaagcaggcccagttttttagacagtaaatatttcattttatactccttttcttgatttttcatttttgcgcgcagggaatcggaaggacaggaatgcatatccagccgatgactgccgtaagagtccaatacttgctgctgatgattcaaataccttatgccggtttgcttcctgctgcttacgctattcctgacaggatacctgccatgaacagctgtatatcgggcatttgattcatacagaggggattataaggctcggttgttacattcatgtgacaaaatagacatggattgacaatttacatgactggaatgatatgaaaaaaggaatgcaggatggtcggttgcttttcttccagagtccgcttataataaatcagcaggctgtaaaggcaaattccaacagatacagaaaaatcaccataccaaattaccggatcaggagactacaatggagtttgacgaaaagctgcagcaacacagaaaaaagaataatctcacctaagaacagcttgcagagtagctgttcttatcgaggacagcggacaaccgtcaagactgaaatgaacggatttacactcgccttgacagccgcccgacgtcccgctgaatgggtgaacgagcggccaatccttcaaagtgtttggccactctctttctgattttgaagcgttccttttctcaaaattgaaataggcgggaagccattttggggctttctcgccttgattaccctttagcaaaggccggtggggctgtctacggtaacatatttgtgtgccactcatcttgatcgtgggttagctttgttattttcttgataagtagaatgctgttagtcaaatcttaactttcatattgtcgataaaattcaataatattaagatattctgcaatatcattctctgatacgtctatacattttaaatatttatcagctaaagaaccatcaaactgcttaataagaaaataggttcttgctatatcatatacagcagggccacggcatacattcataaaatcaataataacaggaattccatctgacattactaatatattatttggatgtaaatctccatgcaatagacaatcatcatcaggcaaagaatttatagtattaaaaatcacttgattatttatttttttattctttaaaattgcaattaagtattctttatatgataaaacatttttagtatgatgtgcaagaatgtctagttgcaagtttacaaatatatttaaatattcatccaaatttgtttcgttttccatcataatatttaaaagtgtttttccatcaatccgttcatagataatccctttacgattttctatcgtaatcatttggaaaggtttaggaattttaattctatttttatacatttctttggaattccgaaattcgagtgcaacatacttatctggatatccttcatagaaaagtttacaaactcttttgtttccgtagtcaaaaacttctgccgtatttcctttacctaataacttcatattttcaagcattttatcctccctataaattcgtatttgaactgttcggtgtgaacccgatgtggtataacgtaagtgaatggctgggtgccgccgccatggcgactgcgttcgggtttatcatggcagggctgttccagcttgtaacacgcagaagcatctggaaggtcgatgtcccgattctggtgttgggtgcattttatggtatccttgcggcctgttatgcgttctttgaggtcgttgtcatcaattacagacccgttattctcacacagggattaaaggcgtcttatccgtcttcccatacgatggcctccatctgtatcatggttacagcgttgattgctctgttctgtctggcgctgcagtatacaggggaacgatccgccaaagcataaacggcagattctagaaaatgacctcaaatgtaattgtttggtcttcccgtatacagcggacctgatatccgaacttatcagcgatttttttgacgatcggcagaccgagtccggtaccggacagcgccttgttgcgggagggttctccgacatagaacggttcccagatccgttccgtgtccagatcgtcatttcccagatcgtttgtgatccgaaaacagcactggccttcgtttttgacgagttctgcatttacggtgccggaggcggcgtattttactgcgttggagagcaggttggaaaacagttccgtgaccagctctgcatttcccatgatttccagattcggtgtgacggctgtgttcaggctaagcccccgcttggaaagaaagagtttctgctctgcgatgcattcgaaaagcagcagatccagcctgatagtggtcagagcatgttctttcctctcaattcccgacaggttcagaagccgttctgtcatctgcgacatccggctgttctgctgaatgatggtttctaaaaaggtgccgtcgtccagcccatccctgattccggaggaatacatgccgatcagggagataggggtctttaagtcgtgggccacgtcgcttaaaagctgttccatctgttgatttttggcctgaagcatactctgatactgctgtatggaaatgctcatctggttcatgctgtccgcaacgtgctccagctcatcgcgggtgttgataatcagcgtgccgtactcctgacgggcgatctcctgcgagaaacgctccatacggcgcagtggattggtaatatgttttaccagtaaatagagcagtattacggtaataatcagggaaatggcatgaagcaggatgctaaaacggttgataatcccgatgaagtccgccgtattaggaacaatggcggcgaccgcatacaaatggggacctaccggaatatattcgactaaaataccatagtttaacttgtcctgctggtaaaggcgaaactgaaaccccttctggacggcggacagataatcctgatcccagagccagaatttttggaaaccgagacccttctcacggaatttttcccgcagactgctgcttaacgcatcgtagtcggaagtattggaggcgtacgtgatcagcacattatcggaagcttccaggctggcgacggcttcatccggtgacattccggcgtctaaatattcccttatgcggctgccggcctggctgacatattctgtctgctggcggaggtaataccgcgccgccaccttcgaattgacaaaaagcgtggcggccagaaccaataccagaatcgatgccgttccacagataaatttggtggaaagccggtggaatcgtcggttttctttagtcatggctgcctcccatcatgtaccctataccgatacgcgtattgatgagatcttcgccgatcttttttcgaagacggcggatattcgtatcgacggtgcgggggtctccctcataatccatcccccacacgtggttcaaaagctgttcccgtgacagtacgatgttttgattggagagaaaatactttaatagttcaaactctgttttggtgaggaccatcttcttgtggtcttttgtcacctccattgtgaccggatttaagcggatttcatggaactgcaggacatcagccgcgttgcacagcttttttatgcgaagcaaaagaacctggatatcaaagggctttcgcaggtaatcgtcggcgccgcaggaaaggccggttacctcactttcgttttctcccttggccgtcagcatgagaaccttaacaggtatgttgaggagacggatttcctttaaggtttgaattccattctgaaccggcatcatccagtctaaaagtaccagatcgaccgggtgctctgtcagaaaatcgacggcggcgcggccgtcggaaaccacgtttaccaggtagccttcgcgctggagatagagctttaagattttctgcatttcaggatcgtcttctgcaatcaatagtttcatggtggtctcctttgccgggaatcatgcagtaccagtaatttacttttgaagtatgtcaagggcatggcttgtaatgcccgctaagtcttctcgttcgcagactgcaaaatggtattttaaatacagttcaaatgtgtcgtgatccatggcgtctatggcctcgcgcatgaataaggcacagccatccgctgcgacgtaatgcagccgggttacaggaagggcagagatcaaatcatcgatatcttcttttctgacaagttcaaataaatcctttggctccgacttagcggaaaatgtccgggaatcgagcaggcccttttccatatactctgcgacgtttatgctgccgcggtggaagccctcgtcaaggaggcagccgtcggatatcacatatgcagcaaagatcacgccgcctggttttgtcacgcgaatcgcctcgcgcagggcctgttgtttatcctcgttggtgtaaaggtgatacagcggtcctaacagcagcgtgatatcgtacatattgtccggaaatgcggacagatccatggcattgccctgggtaatcgttatattttcccccgtctgggtgtttttacggaaaatatctatgttatggccgatcagttccaccgcgtccacggtatagccctgacgtgccagtgcgtgggaataccgtccggtcccggctccgatttcaagaactcggtccccgggcttcctgtatttttcaatgtaacgcatcgtggtgagaaattcaaccgatccatgtctgtatgccagccggttatcttcatcgtattgattatagaaatcggttaagtactggtttgctgtcatatgaggctccttctgctgttgggggcgtctgagggttcctgattgataaatgctgataacagattcatcagcattttttcggcactgcctctgtcaaatgcaatctttccggctgccgttaatactgcgataccatgggtatagagaaacagatccaaaaagattacctttgcacgttctaactctacgccaatggtttcggaaaaggctgccgctcttttttcgttatcggcttcgttataaaagtcctttgcctcagccatatttaaatccatatcgttcataaataacagcttaaataaatgcgtttcttccgctgcaaattcgatatacgaaagaggcagtaataaggaggggattatctgctcggaactgctgaaactgctcacatactgaagatagtattcgtatgcaaaatccagaaaatccttttttaactcctccatattctcgtaacaggtaaaaatcggccgggtagaacactgcagtttgcctgcgatgctccttgcgtttaccgtttcaaaccctgtctctcttgtgatgtcaagaaccgtatgtaatatcatgtcttttgtgatttttgcttttggtggcataagcggctgcctctctgtatgtaaattgtcaggtgtcaggtgaaaattaatagattacagatgttgtgtaacaattgttacatattgagaagataatgtcaagagaaaaaatttcgtattaaatcccgactatttatatctcttccgatactccgaaggcgacatcccatactgcttcttaaacaacagataaaagttctgcctggagttgattcccacaagctcatcaatatcgctgatcggagtatcagaataaagaagaaagtacacggccttttccatgcggtacttagtcagataattccagatcgtaagccccgtcttttcgcggaagattttttgaagatagaccttgttaagcgccacatacgatgcgatctcatcgatattctcaatggaaaaaaagtgatagttgatatagttttttgtctgctccacataagtatctgtggggcttttttcagcggaaagaaggcggacgacctcgatcaaagccttgttgaccagaatatttaagtaataagggtcttttttgttattggtttcattgcagatttcctcgagcaggtgaaagatatttctcgcattctgaattaccaggccggtatttaagttctgaaaaaatgtgccgaggcagggataggcctgaacgagagcagacagagtgccgatggaaggcgtaagctcagactgatagtaattaatgctcatattgatgcaggaatccggggaaatcagcttgtggggcgtgtttccgttgacgatcatcaggtttcgttttttcaggttgtaaatctccccggcaatatcgtaatagcaggttccctctacaatgtaattaaattcaatggacccggccggatgctgatggtagtccatataatatttctgccagttcatatagcagatttcctctggaagaaggacacagtccggattggtaatttgataagcgttttcgtatgccatggcagtttctccttttttctctcgatcgtccgaataaccgtctcatcctatcctaccgcataaattcccaactgtcaaaaaatgtaataaataatagcttcttaataaaaaaagaccttattttaaatggtagaatcatccatggattccgtgtatattaatacgtgtaaagcagtaaatcaaagtaataaataaaaaacaatttggagggcggttactatgaagaaaaatttggcaggactttttgtggcggcggcagtggcggtatccttatgcgcgtgcggttcgggcggaagcggcagtacagctgcagagaagaccagcgaggcggctgcgggggcggcggccggagggggagattcggttacactgacctatgtcacatggaatgagaatcagcgggggcagattcaggataccatcgacggatttcagaagctttacccgaatatcaaagtagatttacagattaccccatggggagaatactggacgaagctggaggccgcggcaaccagcgggaatatggcagatattgtgaccatgcataccaacgtagttgcaaagtacgtaaacggcggcaagctggcgcagctcgatgatttaactcagtacgatgataccttcagctacgataattatcccgagggagtcacgaagctgtatacattcggcgatgcccattacggagtgccgaaggacaaggactgtgtcgtgctcgtatacaataaagaactgttcgacaaagcgggggtagagtatccgaacgcggactggaactggaacgacgtggaggaagcagcgaagaagctgaccgacaaggaaaacggcatctacggatttgccgcatacaaccatgaccaggaaggatggggaaacttcctgtatgaaaacggcggcagtattatcgatgagaccactcaccagtcgggactggacaagccggaatctattgaggcgatggagtggtatatgaatatgaacgccaactattctccttccaatgaaatgatggcggaagtcaattacattgagttatttgcaacgggaacggttgccatgcagacctttggcaactgggaactgagctatttcaccgaaaatgagctggtaaaagataagtttgccattacagaacttcctgcaggtccttccggcatcagggcaacacagatgaacggcctcgcgctgtctgttcccagtgactgtaaaaatatggaagcggccaagaagtttgtcgcttacgcaggttccaaacaggggatgtcagattctgttaacggaccggccattccggcatttacgggggtagatgcagactgggcaaaggcacatgaggatttatacgataccggcgctattttaaagagcatggattacggggtacagtttgtaggaacggagagcaagacaagatggtccgaggtcatgaatacttatgtggcgaaaatcttcaacggggaagcgagcgtccaggaggcgtttacacaggctgcgaaagagatcaatgaaattctggcaacggagaagaaataacaggaatccgtgaatccggggctgctgtcagcttttagcagccctttctttctcagggggaggcaacatgaataaacgaaaatataaaaactatctatggggctacttctttgtcgcgccgacaatcataggattattgattctcaatatttatccgatcttcaaaacacttttgctgagcttttcaaccggcacaggttttgaagagtatgtgttcagcggtctgaataatttcgcacgggtcttaaaggaccgggaggtctggatcggacttagaaacacgcttattttctccgctgtttccgtaccgggcggtatctttatcagtctgcttctggcatggctcatgagcagggagatcaggggaagaagcgtttaccgggttatttattttactcccatggtggctgcacctgcggccgtcaccatggtatgggcctggctttacaactcggaattcggctttttgaattatgtgatcaagagtctgggcggcgcgacacattcctggctgcacgatccgaaatatgcgctgatgtcggtgattattatcgccatatggggcggtctggggcagcagattattattctgatcgtggccatcaccaatgtgccgagagtctactatgaggcggcggaaatcgacggggcgggtggttttgtgaagctgtttaagattaccgttccgctcatttcacccagcgttttcttcctgaccataacgggctttatcggctcactgacacagtttgacttgatttacatgctctataatgctaacacgtcaaaagccatggactcggtaaggacgatcatgtaccagtactacaggcaggcgtttgtcgtacaggataagccgtatgcatcgacaatttcgattgttgcgctgtgtctgattctgatttttaccgggcttcagtttgtggcgcagaagaaaatcgtacattacgaataggaggggagtaaagtggaagcaaacaatagtaaaaaacacgtggtaacccatctccttctgcttctgggcagtattgtgatgctgtttccatttatctggatgattttatcttcctttaaaacggttggagaacagatgtccattcccatgaagattcttcccggaagctttggatatctggaaaattataggcaggcactggaggcggttccgtttctgcgcctgtatctgaatacgatactgatgattttgggacgtgtgatctgcgcggtcatattttccagtatggcagggtatggatttgccaggatggaatttccgtttaaaaggctgttgtttacattggtgctgatgcagatgatggttccgggacagatctttattgtacctcagtatatgatgctctcgaagatcaggctgttaaacacggtgtttgcactgatattcccggccctggtcagcgcgtttggcacgttccttctgcgccagcagtatatggcgctgccaaaagagctggaggaggccgccgtgattgacgggtgtaatccatggcaggtgtttacaaagatcatggtgccggtgacccggtccagtctggcatcgctggcgatttttaccgctctgtttgcatggaaggacttaatgtggccgcttatcgccaataatgatttaaaccggatgcctctggcgcccggactgactgtcctgcagggaatctgcaacaacaataagggcgcattgatggcgggcagcgtgatcgccacggttcccatgctgctgttatacattgcgtgccagaaacagtttattgaagggatagcgcaaaccggtattaaagggtaaatggcttgcaggtaaatgatttgcagggaaaatgatttacaggagaaaatgggtttgaaggagaaaattagacatgaatattgctgaaaatggaatttacttaaatctggggctgaaaaagggagaagcggccaggctgctgcatttttcttctcacccccaggagatggagatcggagataatgacgcctctgtgtacactctggcggaacttcaggccagcggtttcaatcagaatgaccatcatggtctgaaacacacaggcagcagcccgtctctgcttatgacgtatgagagtcaccgggattaccggaatgattacggaagaaaactggaagtgatccagaaatacaatggactggagctgattactcatatccagttctacgacggaattcagacggttaaatttgtcaatgaggtcgtgaaccattctggggaggagtacgctctggagtatgtatcttcctttgcattgaccgggatcacggagcagacaaaggggccgagagacaaaacaggacttctctatattccgcataatacctggtttggagaggcgcagtggaagaaatataccttaaatgaattgggatatgatgcggtaaactctttttccatgaaacggattgctgtcaccaacacgggaagctgggcgtgtgtggagcatctgcccatgggctgctattacaatacggaactggatcagtccctgatgtggcagattgagacgagcggatcgtggcattgggagatcagcgacatccgggggacgctttatgtccaggccgggggacccacgtaccaggaaaatggatttctgaaaatcctgaaaccggatgaacactttctctcggtaccgtgcgcggtatcggcggcaaaaggtgaatttcaggaggcggtcgcggagctgacgaagtacaggcgcagaatccgcaggaaaaatgaagacaacgagaaacttccggttatctttaacgactatatgaactgtctgatgggggatccgacgacagaggtcttaaagccattgatcgatgcggccgcggaatcgggatgcgagtatttctgcgtggactgcggctggtattccgacgggcactggtgggatggagtcggagagtggctgcccagcgacagacgtttcccgggaggaattggggaagtgattcgatatatccgggataaaggtatggttccgggactctggctggaactggaagtaatgggaattaactgtcctatggtttccaaggtcagcaaggactggttctttcagagaaacggccgccccataatcgaccactgcagatatcagctggacttcagaaataaagaggtgcgggactatgccacaggagttataaagcggctggtggaggaatacggcgttggctatatcaagatggattataatatcgacaccggtgttggaaccgattaccatgcggattctgcaggtgaaggactgctctcccataccaggtcgtatttgaactggctggatgagatttttgagacgtatccggacctgattattgagaactgcagcagcggcggcatgagaatggaatattccatgctggcacgccagagcatccagtctgtaaccgaccagacggattacatcaaaatggcggcgatcgctgcaaactgtgcgactgcatgcacgccggagcaggcggcaatctggtcctatccgctggtggaaggaaccggggaggagacgatcttcaacatggtaaacgccatgctgttccggattcaccagagcggttatttaggacagattggagagcagcgcatgcagtatgtgcgggaggggatcgcctgctataagaagatccgggaagatatccgggaagggataccctgctggccgaccggccttgcctccatgtccgacgaatacataagctatggcctggtaaacggcggaaaaatgtatctggctgtctggagaaccggcggcgaaggggagaaatcatttgagattcccttaaaagggagtttcagtgcggcagccgaggtttcctgcatctttccggaaaaaaaggagaccgtatttactgtcaatggaaactgtctaacggtcagtctggctccgaagagcgcgcggctgttcttaatagtcacggaaactcgtgaacagagcgagtgagtgaacaataaccgaaaggttaagtgaggttggaaatgtgactggaaatgtagttgaaaacgcatctggggatacttttgaggctgagcccggggatccgcgtgaaaatgtgaccgggcggccgatgagaagtaaaagcagtattaactggaaaataaagtgtattctcggaggaacaatgctcagccgcaattattatctgtttttgctggtgcatacacttttcctgatctttacgaggattcccgctatttttatcaatactcttctgatgaatcagaccggagatgtaaactccaccctgttttataacggagcgatcttcgccgcgtgcgcgctgacgatgtccttctcagcgcagatcatgcacaagacgggctgccgtgtgacggccacggttggaatcatcggttataatatcctttatctctgctatatcctgtttcagccctatgtggggacttactacatgctttttggactttttaatggtatggcagacggcttttactatatcagctatggtcaaatgattctggattatacagatgtcaccaaccgcgacagcgggatggggatcatcagcacgctgagcgcgggagtaaacttaaccgtaccgtttctggccggcagtatattgtctgcaatcggcggtgtgaaagggtatgtggcgatatttatactggcttttgccgttgcatttcttgctatggctgctgtgtttaaactgcctggagcgccagagaaggagaagaaaaacgtgcggtatggggcatttctccggctgatgggtgaaaatcgccagattttctatggactgctgggggagactttaaaggggataagggaaggaacctttatgttcattctgaacattattctgtatcagctcattaagagcgagttcctgattggctgtaattctctgctgacaggtcttgtgtcgatcgtgtccttctggtttatgagccataccttccggccggacaaccggcgtagattcatgcttctggctgttatcggtctgactggaattacgattgtctgctactggttcctgaatccggccatggtgattctgtttgcagtggtgaatgcgttcctggccggtatggttgagatctcctgttatactacgtttttcgatgtttcacagagcgtgaagtcgatcgaagatttttcgccggagcttctggcgtttcacgagatattcgtggttgccgggcggtgtatcggcctcggagcatttgcgtttattaatacagtatctggggccacgctgaaggctcagatatttagtctgctgctgttgacactggtgcagtttgggacagtatttatgtgcaggacagcggtaagggaagccgtgagaacggcgggatgaagaagaaaaatcctgggtgattcaaaatgagagtgaaaatggattgctttacagggaaacaaaaggactgactgttgtttgggtgagagacattcaaatacggtcggtctttttgttggcgtcggactggccgtcaacggtaacaggggagtgagcagtaacacagggggcgtcaggtaggggcattcatacagttttcgtattgtttttttgtaaataccatgttatactccaagtacgcattttcttatgcgttacgagttcttatgtcatatatatggcatcacggcatgtctgccaaagcattcacaagtgtttggaaataggtaagcggaaggagtggtctgtctatgaaatgattgcaaaaatctgttgtaaagtactaactgtttgagtataatggaggtataaacgtggtaaaagttaataaaaagtataaagacagattatttcgcatggtatttaaccggaaagaggagttgctatctttgtataatgctgtcagccattctgagtatacgaatcctgaagatttggagattcatacgcttgatgatgtcatttatatgaagatgaagaatgaccttgcatttttaacaaaataagcgaggattcccccacctctacaggtggagggctgaatcgccaaaaacaaacttaacggcagtggtgggcatatatcccccactgacatgaggtcaagactatccgacaccggataaaaggcagcaaagctgccgtgtcattttgaatgatatatgggttcaaaatgtggattgaaataattgacgatgttttgaatttgtgggaacatcagtctacctggaatccagctggatagtccccctcacctccgttcggcggaatagtatgccggttcgtggagctttctatatcgtagaggagtacagaaagtatattgaacagaaggggctgaatctgtatggaagccgcctgattacccttcctgttcctcaattttatgtattctataatggcttgaaagaagagccggactatgtagagatgaagttgtccaatgcattttcctcgcttcatccggaattggaaccgtgtatggaatttaaagctattatggtgaacattaaccgggggcacaataaaggtctgatggagcagtgttctgctttgaaagaatacgcggaattcgtggcccgaatcagagacaggacgaaagcaggagcagatctcctggaggcaattggagaagtgattgattcctgcatccgggatgggatactggcggaatttttgtcatcacacagagcggaggtgtttgaggtgctgctgacagaatatgatgagcagagacatatcgcgagtgagaaggaagcgagcagggaagagggaatgaaggatggattagaaatgggattgaaggaaggtcttaaggctggacttcgtaaagctgcgataaatctatttaagcgaggtatgagtatagaagaagccgcaattatttgtgaggaagatgccggtcttgtaagaaaatggtatgaggaatggaaatgttcaataaatattagcaaggattctcccatcctctaaggtggtgcgatgaattgccaagaccaaacttaacggcagtgatgggcggagagtaatcggtatcccccactgtcatgaggtcaacaacacatctatgtaggatgcagtcgaacttcgataatataccgagcgtggattgaaacaagcagtaggggagaaacagacagtagcagccatgcagaaaatcacttatttctgactgaaatccggaaataagtgattttttgcagctctcagcgttcagccaggtggacattttccctgaacgaaaaattctgcacgttaagaattgctaatgccctgcaaagtcacaggaagcggagagggcggcggcagagacaggccagcctgcggagccccgggtggggagtgaacggtaacgtgtttatggtacgcatgattcatacgtatgcacttaggactatgaaaaatagtaaaacagtgatataattctaacaaaagaaccagacagctcatcaaaccaaacagaccatatgtgtcagtgatcagcagtatttattatcattaggaggtcaattacgtgacatcaaaagaattcgctgaaataataggggtttcacaatccaccatatcgagagcgttaaacaacagcagccagatatccgcagaacggcgtgagtttattcagaagaaagcggaagagtacggttttgtactgaacagtcaggcgagaagtttaaagacaaaccgcaccggcacagtgggaatcctgtttccaaagcattttatcggcatgagctctaatcttggactcgctcatttatatgacctggtacaggcggaactgagtaaatatgattatgatgtgatggtcgtctacgacggggaaaaacagaatggtctttccaccttcgaaagaatgattaagatcgggaaagtagacgggtttatcatttttcgaatggaatccagtaaaaaagacttagaactgataaaaaaatataaggtcccctgtgtgtatctgcttcatgcggaaaaagccggttcttatggcagctgcctctcggactgcgaatacagcggatatctgatcggaaagctgttcggaaaatataaggaatataaaagcatttacatcaatgtaaaaacctctgcagaatcgaaaaccagactggcaggatttaaacgggggctgaaggaacgcggcgttgtcatggataaaaatgctgtctggcagagtgaattgtcggttaagtctgcatacgaatgcgtaatcaataatcaggagacggttaagtcgagaaaatgcgcaattctggcatttaatgatacggttgccctcggcgccttaaacgcatgcagggatttgggggtaaaagtgccggaagacgtacagatttcgggcgttggcggtctgcccatcatcgctgaaattgcgccggatctcaccactgtgaatgtatttcacgagagaattgcctccatgggctgcgagatgctccgctccgcgattattcatggtgcccaggagccaattcatactgtgatcagaccagaacttatattgaggggaacgactctgcgataattctttgtgctattcgcataaaaaatccagataaaatgtattaactatgacaaaaatgaataaatatattgacaatgagtttaccgggagctataatttaaccatgcagcaaacgcatacgtatgcgtaaacacacacaaacccaaaggagagggaggattacaatggttagattcggaaggaaagtattggcggcaacattatcggcttctatggttctggcgatgacagcttgcggttccgggagttcaagtaaaaccacagaaaaagcggcggagacaacaaccgcagcggagactgcgaaagaaaccacggcgggggatacagaagagccggcggaggagactgcgggggcggtcatgccgaaagcatcaggtgagaagctggtgatcggtactttggcaaactgggtgggacttcctgcatggtatgcatatgcagaagggtattacgatgaagtgggacttgatgttgaaatcgtaaactttggttcccagggaactcttgtcaacgaggcgatggcagcggatgaatgtgatatcgctgtatccggtatggcttctgtatatgcattgtctaccggtatgtataagtatattggtgatggatgcctgacgatcagcggtgagacgctgtacggccggccggatgatgcgatttacaaggctggtgcggatgccaatggtgtctatggcagctccgatgtattaaaggatgcggtaattcttgggccgatgaatacgacagcccagatgaatgcaattgcatacatgcagtattttggcattgatgcgaattcttttacgtttacgaacctggattactcctctgcactggctgcatttgaatccggtcagggcgatttgattgcggtgaatcctacgtatgcagcgattcttgcaggcgacggttatgtacaggtttctgattttacacaggtgtcaccccaggacattattgatgcggtctattgccagaatgaagtggctgaggatcggccggaggatgtggagcttttcctgtactgctactataaagcatgccaggatatgttaaacaatcaggataacagagttgcagtagcgtataaatggtatgtagatgaaggtcttgattataaggagcaggatgtcattgacgagtgcagccttaagagttattttacactggatacagtggacagcggcgactatctgctgggaagttttatgaattatgctgcagagttccttctggccaatgaaaaggtgacggaagacgatgtagcgaatgtgaaggcaagtattgataacagttttgttacttccataaaaagttgggcggcagctgagtagtcaaatactccgctgcagccgcaaaacggacgagccgtgtatccggcaggtacgctgttcgtggaaataaatccttgagaatcccggtccttttagtttgaaattttttgcgatcattaaattttacatgaacagggccgggatttctttgcaataccgccgtggatgatggcgtactgacaggattaaactgcagaaacttaaggagtaatacgcttgatttaaatggagagagtttgatgaaaacgaataaaaaaatgaacaaatatacaattatttcctgctgcacggttttgattgtgctggcagcctggtatgtctgcattaatgttctgcatttgaaacaggaaacagtctttcccggaccgattacggttgcgaaaacatttgtgcagaaaatgacttcgaaagtaccggatggggcgacgcttccgactcacctgatgggaagcttaaaggttgcgttgtttggttactctttgggagtactgtttggggtcccgatggggattttgatggcctggtttaagtgggtagaccgttttgtaagaccgctgtttgatctgattcggccggttccggggctcgcctggattccaatgtttattcttcttttcggcatcggaattttgccaaaggccgctgttatttttctcagtacatcagttgcatgcattgtaaacagctataccggaattaaacagacaaaacaggagcatctctgggttggagatgtgttcggattttcaaatttgcagaagttatataaaatagcgattcctactgcgctcccgatgatatttaccgggcttcgggtggcgatgggagcggcatggatggctctcgttgcagcggagctcctggcatcctccgtaggcctgggatatatgattcagcagggcaggtacgcttcgaaaccggcgcttgtatttgtcggtatgatcatgatcggaattgttggattactattcgatacgattctgcactggcttgaagtaaaagttgcgaaaggaatgaatgcagaatgaatgaaaatgcaaaagaaaagatattatcagtcatatgcgcggttatttcaatcggagcatttttgcttctatggtggtttgccacgcatcacacagcgttatcacagcttttgcctgaccccgttgtagtgctggaggcaaccttagaatactgtaccggggtggtaggcaaatacagccttatcattcatatgctgagcagcttaagaagagtgctcatcggcttctgtctggggtccctggcaggtgtcatacttggtctgctgatgggaagatatctccttgcgagagcgattttcaatcccattttccgatttatacgcccgattcctccgattgcctggattccgatttctattatatggtttggccttggcgaggaggctaaaatattcctgattttcttagctgcatttgccaacaccacactaaatgcaatgaccggggcaatgaatgtcgatccggaagttgttaatgcagccaggatgcttggggcaaaggaacggcagatctttacaactgtgatcattcctgcatcggttccggctatttttgcaggacttcaggttggaatctcgtctgcgtgggcaagtgtggtggctgccgagatgatcaaggcagagaacggccttggctggattattcaggccggtatggataacaacaatatgactcagattctggccggaatcataatgattggcgttgttggatttttgctggcttatatcatgcgtaaagctgaagaggtgatgtgtcgatggaacaagagcggaagataaatacggtaatcgagtgtaaaggggtcagtaaaatatttgatacgccggaggggaaacacgaagtagtgcgcggactgaattttgccgccagagaaaatgaatttctggttctttttggaccaggtcagtgcggaaaaacaaccattatcaatatgattgccggatttgaacagaccaccgggggaaacataaccgcttccggtaaaaaggtggaccggccggacgtctccagaggagtggtatttcagtccatttccctcttcccctggatgacagccatgggcaatgtcgaatatggacctaaaatagcgggggtgagtaaggaagaacggaaaaaacgggcgcagaagtatattaatctggttgggcttcagggatttgaaaattcctatcccgttcagctttccgggggtatgaagcagcgtgtcggaattgcgagggcatactgcaacgaacctgagttattgctgatggatgaaccttttggtgcactggacgcgcagaccagatatttgatgcaggaggaactgcagagaatctggagtgcggaaaaacgtacggttattttcgtcaccaataatatagaagaggcactgtaccttgcagatcgaattattgttctcaccaattgtcctgccacagtaaagaaggaatatgtcatcgatcttcccagacccagaaatctggtttcggaaaaatttctggctcttcgtaaggaaataaccggcatactggataattcacaggggaattgaggataggaggattagaaatgagtgatcagataaaggtacaggtcagacacctgaccaagaaatttggggatcttctggttctcgatgatgtgtcttttgatgttatggatggggatttgctttgcgtagtaggtcccacgggctgtggaaaaacgacctttctgaacagcctggtcaatatttatgatattacgtcaggtgaaatcttattggacggacagaaggtaaatacgaaaaagcagaatatcgcatatatttttcaggggaattcaacaatgccatggctgaccgtagaggaaaatgtgggctttggtctgctgtataagccgctttccgatgcggaaaagaaagagcggacggaaaagtatttagaaatcgtgggattaagccaatacaggaaatactatccaaaacagctctctgcaagcatgcttcagagggtgagtattgccagagcatttgccacagagccggagctgctgctgatggatgagccgtatgggcagctggatattgaactacgtttcagactggaagatgaactggtgaagctctggcagatgacgaaaacgacggtattatttatcacacataatatcgaggaagcggtctatctgggaaataaaattatgattctgacaaacaagccgactacggttaaaacaacactgatcaatgaacttccgcgtccgcgtgatattgcggatccgcagtttattgagctgcgaaataaagtgacagaacttattaaatggtggtaaatatggaaaagaagaaaaagaatattgtctggttctgtacagaccagcagaggtgggataccattcacagccttggcaatccctatatacatacgccgaatattgaccggctggtgaaggaaggggttgcatttacccgggcttatacacaggcgccgatctgtacgccaagccgtgcctgttttttaacggggcgttatcccagaacgacgaaaacgatttttaacggaaatgaaaagttctcaaaggatgaaaaactggtgacaaagctgttgtctgacgaaggatatacgtgcggcctggtgggcaagcttcatctgacgtctgcggagggaagagtggagaagcggtgcgatgacgggtattcctatttccagtacagtcatcatccgcacaatgactggaaggatgggggaaatgattatcagaactggctgaacgaaaaaggcgttcactgggaagaaatctacggcggtaagtttatgacaatggctacgtggccgcctcaggccaatccctcgttttccgggaagcaggtgggcgttcccgcacagtatcatcagacgacatggtgtgtggagaagacgatcgattttattgagaccaggagaaattccggggaaccgtggctgatcagtgtgaatcctttcgatccccatcctccgttagatccgccgcaggaatataaagaccggctgaacgttgaagagatgccgctgcctctctgggaagacggagagatggagggcaagccgccccatcagcagaaggatgtgatccagggggggcaggatggacaggcggagcccataggatcgcttacggaggaggaaaaacgggagcgtttcagagattactacgcggaaattgaactgattgatgatcagtttggaagactgctttcgtatctcgatcaaaccggcctgcgtgaagacacgatcattattttcatgagtgatcacggggaaatgagcggagatcacggcttgtactggaaaggtgcctatttctatgaaggtcttgtccatgtgcccctgattatttcctgtccgtccatctttaaacagggattcctgtgtgatgctctggtagaactggtagatattgcgccgactcttatggaagcggccggactggaagttccttattttatgcagggcaggagtttttatgatatactgacaggtgaagcggatccccatcatttcaaagacgcagtttacagtgaattctatcactgtctcagaggaactcatgaagacattgatgcgacaatgtattataatgggagatataagctgattgtataccatggaaaagaattcggagaattgtatgaccatgagacagatccgaatgaattccataatttgtgggataaaccggaatatgaggcactgaaaacagaactgataagaaagagttttgatcataccgtcctttgcaatatggacaattccatgcatcgggtctatggtttctgagtgaaggagatgaagaaatgagtcagaaaccggtaaatattgtttggttctgtacggatcagcagcgctatgatacgattcatgcactgggaaatccgtatatccatacaccgaatatcgataaattagcggaagaaggggttgcctttaccagggcctatacgcaggcgccgatttgcacccccagccgttcctgttttttaaccggaagatatccccgaacaacaaaagcattttataacggcaatgacaattattccaaagatgaaaagctggtgacaaagctgctggccgactccggatatgtctgtggtctgtcaggcaagctccatctgacctctgcacaggggcggatggagaaacgcacggacgatggctacagttacatacagtggagtgagcatcccaacgacgactggccgggcggtgaaaatgattatcaaaactggctgaaagaaaaaggacttcgctgggaagagatctatgggggaaaatataccagtatggcaacctggccgccgaaaccgaatcctaattttacaggcaaaaccgttggcgtgccggccgagtaccatcagacgacctggtgtgttgaaaaggcgatcgagtttatcgaacagaaccgtggcagcgggaaaccgtggctgatcagcctgaatccatatgatcctcatccgccgctggacccgccgcaggagtacaaagacaggcttaaaatagaagagatgccgctgcctctgtggaaggaaggggaactggacaccaaaccgccccaccagcagaacgattacttccagggcgggcaggatggccaggcagagccgtatccgacgctgacggatgaagacagaagggagcgttttcgagactattatgcggagattgaactgattgatgaccagttcgggcgactgatggagtacctcgaagagacggggcaaagagaagacacgctcgtgattttcatgagtgatcacggtgagatgaacggagatcacggcctttactggaagggagcttatttctatgaagccttagtccatattcctctcatcctgtcctgcccttctctgttcagaagaggcttaaagagtgatgcgctggttgaacttgtggatctggctccaacgctgatggagcttaccggtcaggaagtaccgtactatatgcaggggaaaagtctccttcccattttgaccgggcaggtggatccccatcatcataaggattcggtttattcagaattctatcactgcctccttggatcgcatgataatatttatgcaaccatgtattacgatgggagatacaaaattgtcaattaccacggaatggaatatggggaactgtatgaccatgagacggatccggacgagttttgcaatttgtgggacaagccggagtatgccataaaaaaagctgagttgatcaaaaagaattttgacagtgccgttatgaaaaatatggatcggtctatgcatatgatcaacgaatactgattaaatatgcagaccaaatatgcagaccaaaggagatgctgatgaaacttaccttagaaggaatcaaagacaagcaggcatggaaccgggcgggaatcggactgccatcttatgatttggaaacactggcacagcggacaacggaagcaccggtatgggttcattttggtattgggaatatattcaggatttttataggcagtattgcggaccgcctgatcacagacggactgatggaccgtggaatcgtctgtgtggagacatttgactatgagacgatcgaccgcatctataagccatacgataatctttgtctgtccgtgatcttacataacgacggttcgacggaaaaaagagtattcggctgttttactgaagcgctgaaagggctgccggatgagacgaatgacagaaggcggttaaaagagatctttgcaaatcccagccttcagatggtctcctttacaatcacggaaaagggctatgcactgcgcggggcggatgggcagtattacagcttcattcaggccgacatcgatcatggtccggaacgggccgtgggggctatagcggtgatagctgccatgcttctggagcggtatcaggcgggggcaaagccgctggcgcttgtatctatggataactgttctcagaacggggacaggcttcgcagcgcagtgctggaaatagggcgggaatggagagacaggggatttgtggaagaggaatttgtaaactacatcagcgatgaagagaagatcgcatttccctggaccatgattgataaaattacgccgaggccgggagagaccgtgaagacgatgcttcaggaggccggtgtagaggatatggatattgttgttactcaaaagcagacctatattgcaccctttgtaaatgcggaagaaccgcagtatctggtggtggaagaccattttcccggcggcaggccgcctctggaaaaggccggcgtctacatgaccagccgtgaaacggtaaataaggcggaacggatgaaggttaccgtctgcttaaatccgatccataccgctctggctccatacggctgtgtgctgggatttacacttttttccgatcagatgcgtgatccggagatggttaagcttgctaaaaaggtagggctccgggagggcatggaatttgtggaggaccccggtatcatttcaccgaaagcgtttattgacgagtgcatcaacgtgcgtttttccaatccatatctgggggacacgccgcagcgtatcgcagtggacacgtcgcagatggtcggaatccggtttggggaaaacatcaaagcatgcgtacgaaaatacggcaatgctaaaaaactgacagggattccgctggcgattgccggatggcttcgttatctgcttgctgtggatgacgaggggaaaacgtttgaactctccccggatccgatgattcccgaactgcaggcacagatggcaggaattgtgtttggagatccggacagcttacaggatcagctgcggccgattctcagtaatcgcaatatttttggtatcgatctgtatgaagctgggatcggtgaaacgattacggagatgctgcgggaagaaattgcaggtaagggagcggtcagagctgcgttgaaaaaatatctcgcgtaagagcgctgccaaagaagaaaatgtaatacagaaaagaacatagaaccatagaaaaatggccgcagttcgttgcaaatgcaacatactgcggccgctttttgtgataagctgaatacgaatttaagaatggaggaactacgatatggagaacagaatgttttgctatcagtgccaggaaaccgccggttgttccggatgtacaaaatcgggtgtctgtggaaagggaccccgtacggccgctttacaggatatgctggtctgggtgacaaaaggtatttcggaagcagcggtacgtttgcgggaggaaaaccggaatgtcccggatgaagtaaacagccgggtaatggaaaatcttttcattaccatcaccaatggtaatttcgatgatgaggcaatcatccgcaggatccgccggactctggcgatgaaaagggatctcatagactgtctgtccggaacagaaggtctgtctgaggctgctctctgggatgacgcagaggccctggaggagaaagcaaagggcatcggcgtgttatcgacagaggatgaggacatccgcagtctccgggaactgattacgtatggactgaaagggatggcagcatatttaaaacacgcagcggccctggagaggaaagcggaaaacggcgccggttaccatgcagacgggatgagagatgcggaggaatttttagagaaggcgctggctgctactctggatcagaatatgactgtttcggagctgacagcgctggctcttgaaacgggagagtatggcgtgaaggccatggcgattctcgatgaggcaaatacgtctgcctttggccatccggagataacaaaagtcagcatcggcgtcagaaagaatccgggaatactcgtttccggccatgacttatgcgatctggagcagctcctggagcagacggagggaaccggcattgacgtctatacccactcggaaatgcttccggcccactattatccggcgtttaagaaatacgctcattttgcaggaaactatgggaacgcatggtggaagcagaaggaggaatttgaggcatttggaggtccggtcctgctgaccacgaactgccttgttccgccgaaagacagctataaggggcggctttatacaaccggagcagttggatatccaggctgtaagcacatagaagcgggcgcagacggaacgaaagattttacggaaatgatcaatcaggccaaacagtgtccggcgccggttgagctggagaccggcagtattgtgggcggatttgcacataatcaggttctggcactggcagatccgattgttgaagccgtaaaaagcggagccatcaaaaaattcgttgtgatggcaggctgcgacggccgcgcaccatcgagaaattattatacggatttcgccagggcgcttccaaaggatacggtcattttaacagccggctgtgcgaaatataaatataacaagctgaacctcggtgagatcggcggcattccccgcgtgctggatgccgggcagtgcaacgacagctattccctggcggtgattgccctgaagctgaaggaagtattcgggcttgacgatatcaatgatctgccgattatctataacatcgcatggtatgagcagaaggcggtcattgttctgctggctctgctttctcttggcgtgaagaatattcatctgggaccgacactgccagcctttttgtcacccaatgtggccaatgtactggtggaacagttcgggatcgcagggatcagaacggcagaagaggatatgaaaatattttttgaaatatagcattcagggcggaggaaggcaaagtcctgaatcagcctgatggatagaggattttcgtatcttctgcggggtggttccatacatttctttaaagatccgcataaagaccttgtaattggtaagaccattctgcaccatcagctgcgtgatgctttcatcagatttcagaagatcctcgtaaaaattcatggttcgtacagaatttacgtatgcaagaaatgtctggccggtatacttcttaaacaggcggcagaaatactcacggctcaagccctgggaagctgccgcatcatcgagcgtcagcggtttgcgaaaattccggcggacataatccataattccggcaatccgtctcatatcccggctggaaccgccggcggcgccggcttcgttccagtgggagcagcagcggtaaagataatagaggaactcatataagtgggcggttaccagaagctggtagccgtccgcctgtttttcgtactcgcttaccatggtttctaagtggaagaacatttccttttgatccggactccggttttcctttgagatcagtgtctgaaaatggagcgcttcaaaattcgggaaaaaacgccttaactgttcagctgaaatctgaagaagtacataggtggtaaggcctgccgtctgtgtcatatgaagctcattggaattgatgaccagcaggcttccgggctcaggctgatacgattcagcctggatgactgccgtcagtctgccgtcgattaagcacaggatctctaaatattcgtgccagtgggccggtatggtcatgggcatgcagtggaccagctccagctttgccggcagattgacattctcggaaacctcttcgtgtatgatatgtgccatcctgaaacctcccctctttgcagtatatcaatagtgacaggaatatctgctgttattctactaaaagtttataaatatatcaatatcaacctataaaaggttaaaaaaacatctagcgggtgagaggggaatcgtgcataatagagaaaaacagacagataccatttggaggtcagatatgaaattgaaaaacagaacatttaccggttcgacatcagctgcagtgacgaaaagagagcaggaaaacagggagatcgcccgcagagcggcctccgagggatttgtacttttgaaaaatgacggccatctgctgccgcttgccgcaaaaggaaaaatcgggctttacggagccggggcggtaaagaccataaaaggcggcactggttcaggcgatgtcaatgagagggactgtgtttccatctgccaggggttaaaggccgcaggctatgaagtgaccagcgacgcatggctttcctcttatgagactatttacgcagatgcaagacaggcatggaaggaggaagtcttaaggaagctgaaacagtatgacggcaactttttccaggcgtattccacgactccgtttgtcgttccctgcggcgattccctcgatgaggaggctgcaaaggcggatggagccgatgtggcggtatttgtactcagccgtattgcaggtgaaaatgcggaccgtcacgatacggaaggtgattacttcatcacaaaagaagaaaaatcgcttctggcacagatttcagcctcttacgacagtgtggttctcgtcatcaataccggaggactgatcgatctggcatttacagaggaatttacgaatatcaaatcgattgtgcagtttatgcaggcaggccaggaaggcggttcggcatttgccgatatcgtgtccggcgctgtaaatccaagtggaaaaatgacggattcctgggcatatacctacctggattatcccaacgcccggaccttcagccataaaaacggcaacacggatacagaaaagtacgaagagggaattttcgtaggataccgttattttgatacctttgatgtaccggttcgctacggtttcggctttggattgtcctatacggaattttccgtggtgggaaccggagtcagtgcttccggcctgggcacagaccagccgaaaatctcggttacggcttccgtgaagaataccgggaatacctatgccgggaaggaagtcgctgaagtctacgtttcctgtccgcagaacggcatgccaaaagagtaccgccgtctggccggcttcgcaaagaccaggcttttgtctccgggagaaaatcaggatttgacgattacgttcccgttataccagctggcttcctatcatgaagatcggtcggcatggattctggaagctggtacatatggcatctgggtaggaaattctctggaatccgccagcttatctgctacgatcagcctcgatgcagatgtcgtgatggtgcagtgtgaatccatctgtgagagaaaagaagatttgaaggaactgattccggacgccggtaaaatgaaggaaaaagaggccgcatggaagagtctggcggaatcgttaaagcttcctgatctgtcggtctgtgcagatcagattgtgacagaaacggttgcctatccggaacactcaggcgtgacggagggaaaagtaggggagatcgtcagcaccttatcggaggaacagctgattgcgcttgctacaggagatcccggaaagggacaggagaatgcccttggttccgcagggctgactgtgccgggtgctgcggcagagacctcatccgctgcgattgagtccccatggaacgtagccagcatggtactggcagacggacctgccggtttaaggcttcataagacgtaccaggttgtagatggaaagatcaataagggcagtttccttcaggcgtttgaaggcggatttttcgctgatccggaagagccggaaggaaccacttactatcagtactgtacggcacttccggtcggcacgcttcttgcccagacatgggatgtcaatctcctgaaggaagcaggggagatgatcggccgtgagatggaactgtttaacgtgactctgtggctggcgcctggtatgaatattcaccggaacccgctttgcggccggaacttcgaatactattccgaggatccgctgctgtccggtatgatggcgtctgcgatcactctcggtgttcagaaagttccgggatgcggaactaccatcaagcattttgcctgcaacaatcaggaagacaaccgtatggggtcagattccgtcctttccgagagagcgctgcgcgaaatctatttaaagggatttgaaatagctgtgaaaaattcacagcccatgtcgatcatgacgtcctacaaccagatcaacggcgtacatgcggccaattcctatgatatctgcacaaaggctgccagagacgagtggggatttgcgggcgcgatcatgacagactggaccaccaccacggcttccaccgcaggcgtatgtaccgccgcaggctgtatgcgcgcgggcaacgacatggttatgccgggagtgaaagaagatcacgacaatatccgcagagagcttaaagagggaaccctggaaatcagtgcgctgcagagatgtatctgcaataccgtcaatctggtgctgcagtccaaccagtacgaggatgcagtcagctacagcagcaggtttgagaagctggatacgtatatgacggcagaatagaaaaacaggttgcaaacggtaacaaaaacagttctttggaactcaaatacacgttgacaagcgggttctcagtaaatataataaaagcagtaacaaagtgcgaatggctcctgccattcgcatttgtcgtattaaggaacatgaacagatttgttcatcttgaggatcggaggggctatatggattacacttaccggctgctggcggtggatgatgagacggatatattgcgcacaaaccgtaagtatctggaagcaaggggctatcaggttgattcggcggtctgcgcgtctgaggcgctggaattactgagaaaacagaagtacgactgcattctgctggatgtgctgcttccggatatgaatggatttgaactctgtgaggcagtgcgtgccatcacttctgcccctattctctttctcagctgtatggatgacgaggaagataagatcagggggctgatggcggggggagaggattatattacaaagccttacagtttaaaggaactggccgcccgcgtgtatgcgcaggtgagacgcagtaccataaagagagttgccgttgatcgagagaaccagcttctgcggattgacgaccggataattcccctggcacagaaggagtttgaactgtttctgtttctgctgggcaatcctggacggatcctgtcggcatcggagctttatcaggaggtatggcgcacagggaagccggacaatgccaatacggtggcggtacatatgacacggctgcggcacaagctggaggaggcagagccggtcattggccggattgagacagtccgcggagaggggtaccggttcctgccgaaggtggaagcggggacgatattatgaaacggtttttggcgatttttctattgattttcagcttgtgcctggctctgttttttgcttcctccagaccgtttgtttcggaggggccgagggcgggagagggaatactggactttcgggaggcggattttacttcttccgtgtatgaactgtcggggcagtgggagttttatcacagtcagctgtataccccggaggattttcggacgggaagtccggcagggatggaatatattgacctgcccggtccgtggaccaggatggggtatccggggctcggttatgcaacgtaccggctgaggatcctgacggaaccggggcagatctatcttctgtatattccggagatcatgtcctcctctgcggtctggctcaatggaaaagaattttaccatgccggcaaggtgggcatgtcggacctggataccgttaccggggtacgcaatgaactgctggcggcggcaacgccggacggtgttctggagctggtgatccaggcggccaattaccgtatgaacggaagcgggatcttttatccgattctgatcggacgggatacggtactgacccactgcatgttctggcagcggaccgtggcggcggcagctttgggaggcattcttctgatcggtgtttaccatctgttcctctatttcttccgccggcgggagcggctgtatctgaccttcagcctcacctgtctggcagccgtgctgcggctggggatggagagcaatgcgctggtccagtattttctgcctggcggaatcggatttcttttaagcagggtttttcttttgctgtttacgatacacagtctctgcatctgccttttcatggtgcaggcattttccatccggctggggcgctgccttcgtattttttacatactctgtttcggactgcccatggcggggatctgcgtcctgccctatgcacaggcggtgacaggcatgttcctggtcatgattccctatggcatctcaatctttctggcgttccggtcagggaacatcggcagggacccgtaccggctgctttatctgttcagtatggtgactttcgtgatctacggccctctgaccaaaaccctgtttgaaggggacatgtttctgcccggcatcgtgccgaacatgttcttaattctcagccagtgcgttatgctgtcgcgcagctatgcgcaggctcacgaggaggtggaacgggtcaatacgaacctggaagatctggttaagcagcgcacggcccagttaaacagtgccaatgaacagctggcagcctcccagtcggccctgcgggaaatgatcagcaacatttcccatgatttaaagactcctctgacggtactcaacaattatctggagctgctgggggatgagactgtcgcctccagtgagcaggagcggacggaatatctgggaattgcctatcataagaacctggatctccagcggctcatccataatctgtttgaagttaccaggatggaaggcggtacggtcagctaccgtctggaatgggttatggcccttccgcttatggaggaggcggaaagaaagtacggggacctggccggcggcatggggctcttctttacggcagaggcggatgatgcgctgaaactgaagatagatagaaataaaatctggagcgtgctggataatctggtctataatgcactgcgccatacgccggagggcggcagtatcgcccttggtattaagcggagaggagaccgggcagtgcttacggtggcggataccggggaggggatagatgccgggcatctccctcatatctttgaacggttctataaagtgtcgccggagcgcggagaaaaggatggttccagcggtctgggactttatattgtgaagaccaccgcggaggccatgggcggaactgtggaggtggagagcgtgccggggaagggaaccgtattcaccttgacgtttccggcaaactgatgttttccggatgatggaatcatgccgttaacagagacatatttgatacagaatggaagaactgggagggacagggatgaaaaatgtactggcattactgaaaaatgagaaccgaaggttaagccagcaggcggaaacggactggctgacagggctgtataaccggatggcggttgaagaaaaggttggcaggcgattaaagaagtatgagaccggcgtgctgtttgtcattgatattgataattttaagagtatcaacgacaggtacggccaccttgcaggcgaccaggttttgcgcggagtcgcccggattttgcaggaacgggtttttcacagtgatattctggggcggattggcggggatgagtttgtcatctttatgagcgtaaagcaggatcagaactttattgaggagcggtgccgccagataaggcagcagttcctcaatcttccgccggaccagtttatggttaccaggctgtctgttacagtctgcggaagcatttatcaaaaaggggatgattatcagcgcctgtttgaccgtgcagaccagcgcctgatcacagaaaaaagtctgcggaaaaaaagaccggccgatgcggataaccggccggagaacacatcgaacatgaaaagcctgaagaccgatatggagcaggtgagtctggagctgtctgaacccaatccgtatgcaggggcgttctgtcaggattatgacagctttgtgggcatataccgctttgtggaacggaggcttcagcgggtacagtccagtgtgtacagtctcctttttacgctggcggacgaacacggagattttcccgatcttcctgaacggattctgctgatggaagaactgcatacaatcatacagatgtccctgcgggcgggagacgtatttacgagatacagcagctgccagtatctcgtcatggtatcagatgcgacggatctgcagacagatggcatcgcagaacggatccgtgaaaaatttataaacagctcctccttttccgataaatatatactgatctataaacggtatccgctgaagccgtcggaggcgcgcggcaggaaatgaaaggatctgtgctgtgcgaggcagcaggatggcattttctataaaatttcctttaccacttcagcgaatctctccacatcctccggggcatcgaggctgtacagcagaccgtaggggatactgtaatcccagtttacaggaatcgtcacaagccccggatggacctcctgccagcattcgatcgtaagcaggacatttccggtttccgcgcagcggttgaatacggacaaatcataaaaccggggggtatcctcaatcgtgatctggggatgatgcttttccaaatcgttgcggagaaaatcattgactccggaatccccccgctctaccatcatcatcgtttccccgtataaatcttcaatctccaggctttttctgtctgccaggcggtgctctctggacacggcaatcatttttttataccgtcccagagggaggaatctgcaccgggaaagccatgccttcgaatcacatacaccaatcagaaaatcaaatttttttcccaattgttcaatctcagagaggatgccctcgtgattatcctgaaatgtcacaagatgcagcttataatctggaaaatcatgattcacacggtaccacaaatccataaatggctttgcgggatttaaaagtgacgtgccgatgcagaagactgtgtctctggcgtggatggcggctttcgcacctgcaatggattttttcgaataatcaatcataaattttgcgtcctgataaatgacggagcctgcagctgtcagactcactccggacggggtgcgctccaataatttcatgccaagatggtcttctaaggcattgatctgcttcatgaccgcggttggggaaatatagaggcgttcggcggccctggtgaagctgccgcagtcggcggccgctatgagagtatccagcatatggttgtacatgagaattcctcctgttcctgtcaggcagcccgtgcggcgattcttcgaaacgggcttaaagtatgaacaataagtttatacaataataacatacaggagattcaaaatcaagaatatgggaggtacaatacaggaaacggtaacaataaaaaggaggaaaacgagatgacggaactgattgcattcttctcaagaggagaggaaaactatgtgaacggggagataaggactcttgagaaagggaatacggaagcggcggcaggtatgattcaaaagtttacaggggcggatctgtttaaaatagagccgcagcaggcctattccgcagattacaatgagtgcactgcgcaggcgcaggcagatcagaggcggaatgcccggccggagctggctgcgtatccggagagcctggaaccgtatgatgtcatttatcttggttatcccaattactgggggacgatgccgatggcagtatttacgtttctggaacattttgattttacaggaaagacgatcagaccattttgtacccatgagggaagcgggatgggaagcagcgctgcggatataaagaagctgtgccccggagctattatagggaaggcgctggcgattcgcggcggaagagtaaaccagtcagaaaaagagattgagagctggctgaaataaaggagaaaatcatatgaatgcagagaacttgagtgtatttccggcgggaaaaccaaacgacgcctatgcagagtattttacgggtcagagttacctggcgatgctttccacagaacaggttgttatcggaaatgttacatttgagccagggtgccgcaatcactggcatattcatcatgcggacaaaggcggcgggcagattcttttggtgacagcgggaagaggatattatcaggaatgggggaaggaggccagagaattaaagcctggtgatgctgttgccatccccgccggagtgaaacactggcacggcgccgcacctgattcctggttccagcatctggctgttgaggtgccgggagaacactgcagaaatgaatggtgcgagccggttaccggggaagattacagcaaactgggatgacagaaaactgagataacagaaaacaaaagcagacaatatctgatattgtgtacttaatacctgatcaatggagaaagagaggaacagacatatggaaaaagtgacggctggaaaagaacaactgggagattttgctccgaagtttgcagaattaaatgatgatgtgctgtttggagaggtgtgggcgagagaggggcagctgtcggcgagggaccgctgtatcgtcacggttactgcgctgatggcgagcgggattctggacagttccctgaaattccaccttttcaatgcgaagaaacacggcgttacaaaggaagagatcgccgagatcctcacacatgctgctttttacgcaggctggccgaaggcatgggccgcgttccatatggcgaaagaggtatggcagtaatttgtgtttctgtacagaaaggaaagctaaaaaaatggaatatacaacgttaggaaattctggcattgaggtctcccgcctgtgcgcgggctgtatgagttttggagaccctgccagcaagatgcatgcctggacgctgaatccggcggagagtgaagcgattatcagacatgcgctggacttggggattaatttttttgacacagcaaactgctattctgcggggacaagtgaagaatatctcggaagagcgatcagaaacaacacggcgagggaccgggtggttctcgctacgaaggtctattttaatgaaggcagactgtcaaaggacgcaattttgagagaggtggaaggttcgctgaggcgtctgggcacagactatatcgacctcctgattatccaccggttcgactatgatacgcctgtcggggagacgatggaagccctgcataaggtggttcagtccggtaaggtacgggccatcggtgcatctgccatgtacggatatcagtttatggaaatgcagtacaccgcagaaaagaatggctggacaaaatttgtttccatgcagaaccactataatctgctctatcgggaagatgagcgggaactgattccgatctgtgacgcgcagaatgtggcgagaaccccatacagcccgctggcggccggaagactgtcgcgtccaacctggtctgcggatacactgaggagcagaaccgatgtgacggcacagggaaaatacgacaaaacacgagaaagcgatatggtcatcgtaaaacgggtatctgagcttgcagagaagaaggatgcgacgatgacgcagattgccctggcctggcagtttgcaaagggtgcggcatcgccggtgatcggtgcaacgaaggcaaagtatcttgacgacgcggccggcagtttttccgtaaagctgtcaaaagaggagattgattatcttgaggaggcctatgtgccggatcacgtagtgggtgcgctgtagagacaggaaaggcagaaacctgcgggccgcgcagtttattgaacagaggagaataaaatggaatacgtaaaattaagcaatggcatggaaatgccgattttgggttatggcgtctatcaggtgtcaaaggaagaatgcgagagatgcgtgcttgacgcattgagggcgggttaccgttcaatcgatacggcacaggcatattttaatgaagaggaggttggaacggcgcttataaagtccggtatcccgagaaaggatattttcctgacctcgaaggtgtgggtggagcattacggctatgaggagtgcagaaaatcagttgaagcatcactgaggaagctgcagactgattaccttgatctgatgctgctgcatcagccgtttgccgattattacggggcatggagggctttggaggaactgtatgaggagggaaagctgcgtgcggtcgggatttccaatttctatcctgaccggatggtggatctggcctcctttgcccgcatccgcccgatggtcaatcaggtggaaacacatccgtataaccagcagattctcgccaaagagtatatggatcaatacggcgtacagatagaggcatgggcgcctttcggcgaaggaagaggcggcctgtttgaggatcctgtgctgatggagacgggagcaaagtacgggaagacaaccgcgcagattatgctgagatggaatatccagcgaggcgtggtggtaattccgaaatccgtccattatgagcacatggtggaaaatttcgatgtattcgattttgcactgagcaatggggatatggagaaaatagcttcccttgataaaaaagcgagttcatttttctcccatcaggatccggccacggtggagtggtttgttcagatggtggaagaacggaaaaagaatcaggggaacgtgtgacatacaagtttgacaaacagacgattctgcccggataccgtctgccggaagatgggatcgtgccgtttcttttgataattgtaaaaaataaaataattagtagtaaaccagttgaattccagacaaaatgttgttataataaaagtaaatattctgttatttctcaatgaaaccgagtatcggcattaagagcggccgctgtctgatcttgacaaaaatctttgcatttcccctcgtttgaatataagtgaatcatttatttgccagtactgcactgcagtacttaatcgctgtgagataaaatgaaaatttcattcgataaaactgcagctgacggatgatgacagaattggctgccgcgtgatacaatggaagctgttgatcgttctgcgcgattctaatggacgagtgaagataaaagataaggagtacgaaaagaggatatatggataaacatcaggtgttaaaacaatattttggttatgatgagtttcgtgacggtcaggagattctgattgacagtattttaaacggccgtgatacgctgggaatcatgccgaccggcgccggaaagtcactgtgctttcagattccggcgctgatgatggacgggattaccctggtgatttctccgttaatctcactgatgaaggaccaggtggaggcgctaaaccaggccgggatccatgctgcctatttaaacagttccctgacggcttcccagtattaccgcgcactggcctatgcaagggaagggcgttaccctattatctatgttgcaccggagcgcctggtgacggaagaatttctggattttgcattgaatacgaagatttccatggtagcggtggatgaggcccactgtgtgtcccagtgggggcaggatttcagacccagctatttgaagattgtggagttcatcgaccggctgaacgttcgtccggtcgtcagcgcgtttacggcgacggcgacgaaagaggtaagggacgatatcagcgacatcctgatgctgcgggagccgacggtactcacgacgggcttcgaccgtccgaatctctatttcggagtccaggcaccgaaggacaagtatgcgaccatgaagaatttcctggaactgcatccgggacagagtggcgtgatctactgtctgaccagaaaaaatgtggaggaggtcagcgataagctgcgggctgacggattctctgttacaaggtaccatgccggattaagcgatgcggagcgtaagaagaatcaggaggattttatctacgacagggcggcgatcgttgtggcgaccaatgcttttggcatgggaattgataaatccaatgtccgctttgtaatccattataatatgccgaagaatatggagagctattatcaggaggcaggcagagccgggcgagacggagaaccggcagaatgtatcttgctttacggcggccaggatgtgatcacaaaccagctgtttatcgataacaaccgggataatcaggaactggacgcggttacccgcgctatcgtccaggagagagaccgggaacggcttcgcaggatgacgttttactgctttacgaatgagtgtctgcgggattacatattgaggtattttggtgagtatggtgaaaactactgcggaaactgttccaactgtttaagccagtttgaaacggtggatgtgacggatatcgcaaaagggatcatcggatgcgtggagagcagcagacagagatacggcacgaacgtgattattgatacggtgcacggagccaatacggcaaagatcagacagtatcatatggatgaaaatccccactactcggaacttgccaaagtgccgtcctacaagctgagacaggtgataaactaccttcagctcaacgaataccttgcggtgaccaatgacgaatacgcggtcgttaagctgacggagaaatccagggctgtgctggaagagggcgaacccgttgtcatgaagatggcaaaggaacaggagcatcctgcgaaggtgaaagcagaaaaaggaaagaagagccggaaagggctggcggccggtctttcggaagccggtttttcagaaagcgacgaagcgctgttcgatcagctccgcgcgctgcgttccgaaatcgcgaaagaggagaaagttccgccgtatattgtattctctgataagacgctgactcacatgtgtgtgataaaacccaaaaccagggcagagatgctgacggtaaccggggttggggaatttaagtttgaaaagtatggggaaaggtttttggagtgtatcagggcggagactggagcagctcacgcggaaacagcagagaatctttcagaaagggctgctgatcgcgcgttcggagactctgcggtatctccagcagcggattatgacgcaggcttcgccggcgatgatctgtatttcagcagtgacagcggagagtttgatgactggtctctggacgatgttatggcggcatgggagagcggaagccaggagccgctgaagcaggaggaaccatcggttgaggccgctgctgtaaaaaagaagaaggggaaatcagccaaaacggaatttgtcatgacccgggagcttgcagatgaacttcactattcggaacgggtctccttaagcgattttataggacagatcaatgatcttcgggatgaagacaccatgaaacggctgacgatcaaatcggtagagcaaaagctgatcgaggacggatattatgaagaacagttttttaatgggatgaagcggaagcgtttgacggaggccggagaagcgttcggtattgaagcggagaagcgtctgagtgaaaagggaaacgaatacgatgtgttcttctatacggagaaagcgcagcgggccattacggcatggctactggaatctgtatgaaatgagggtggagaaaaacaaaaaacttgccgagttaaagcgtcaaatggctaaaatcagtaaaaatttatctttttcatgaaaatactagcatgagttatttttttgacccggcgtatgggatatgatagaaaaataaaatgtgttaaaaaaataactattggagggcaacacggtatggaaacgaaagagaaggtgcaaaagacgctgaacgggattcagtctgcggtacttttgctgctaattgtggctgcggttgcggtctgtatccgctttaaagttggcggaccgatgatagggctgtttttcagctggctcatcatctatctgttctgtattggactaaagattgactatgaacatgtgaaagcaggcgcatttgatgcgttgaaggtagttctgcctaccatgacgattttaatggcgattggtgttttgatcggaacatggatggcttccggaacgattcccacgattattgtgtatggattgaaatcgattaatccggcatttttactgacctttactctgatttttacggcggtgctcagcctggtgacgggaacctcatacggttccgcgggcagtgccggtgtggcgatgatggcaatcggcaatgccatggggatcaatccgggaatggtggccggtgcggtaatctgcggagccatgtttggagacaagctgagcccgttttccgatacgaccaacctggctccggccgtggcgggggcgaagctgggagatcatattaagagcatgctctggacgacgcttcctccgatgctgatcagtatcgttgtctttacggttctgggaatcagccagacgaacggcggatatgatccgggagatttgaatgtttatatcgattatctgcagggagcgttccacattggctggacgaccctgatcccggcagtcttgattatcgtcctgttaatgctccgggtaggtgcgtttgaagcactgggaatcggcgctgtcgcaggcgcgctggtggcagtctttgtccagggagtggatctgcgttccattctgaagatctgttacgatggatttaccagtgatacagagattggagtattaaaatctatcctgaacagaggcggtatggccagtatgcttcagtatgtggctatcatcacctttgcagtgggcatgggcggcatgcttgaccggctgggggtactgaataatattctttccgttttcgtaaaacggatcaacagtgacgggtccctggttctggccacgcttctgaccggttatgttaccagcattgtcagctgttccagcccgatgtctcacgtactgaccgggcgtctgatgcagcctctctttaaagaacgggggattgaaccgagaattctttcccggtgtttggaggacagcggaacgctggcaggccccatgattccgtggcacggatacggaatttacatggctgggaccctgggagtcacgtgggcgcagtatatcgggtttgttccccttctgtggctgacgccgctgttttccatactgtatggatttacggggatttccataaaacgtgtggcggatcagaagaaaaacagcgatgggaaataacagataacggctgatattataaataacaggtgcgtttttaactgcgcacctgctgtttttaatcttagccgttatttttttgatattgtccgctgctgtgccagtgccgtcagccgtgccatgtcgtgaatcacagtctggtggccgcgtttgctcacaacgcccatatcctttaattttcccatgatccgtgttacggtgatggtatgaatgcccagatagtttgccagctcgctgtaggagaaatccttgtgaatgacgtaatgggggccttcgcagacagccagttcagtcagggcgtaacagaggcttacaaagttgtcgccatcctgaagggcataacagtgctttaatgcattgtcgtaatgcgcgatggcagtctcaaagagccaccggtaaaagtcgggatgagactccacgtattcacggaatgtgttatatggtatctgatacagcaggcacgcggattttgccgtgattgaaaatgcataaaaggtgtcgtcggggtaagatctggcgtaggccggtataaaaccgacgaagtcaccggggagaaaatactgatagatccgttccctgccgccgggagaaacgctgtggagtgcacaaagcccctcttcgaggcagtatacgtatttgtccaaatgggcacgattgtagagacagtcatttttctttttacgggtcagtgtgccgagatcccggagttcgtttaaacaggcggcgcttgattccatcttccgtttccccctcttatgtatggcgttattctgatcgtctaatcccctgatactgtgagataccaggttcatagtataccatattcgtctggaaataaaaagaaaaatcatagcaactgatattttttgcgggaaaaaacaatgttataattttaacaaaattgacaggaggggcagtacattggaacgaaaaacaatcggttatcatcggatcagccatttggtggagcgtcagtatcagaacgaagaggctatgagaaaggagcttgaatgcgggaactataccgcagagcatccttatatcgtggtaaacccttatctcgtaaatccgctgacggccatgattttatttaaaacagaaaaagaggaggcagtgactctgactgtaaagggaaaagaagctgccggtgatattacccatacatttccgaaggcgaaggagcagatccttccggtgcttgggctctatccggagtatgacaatacggttgtgattgcgctggaggacggaacggcttacgaagtaactgtgaccacggaacagattgaaaatatgccgtaccaggcggattatatcaacacaacgagtgattatatgaatgggcagctgatgttcgtgacacctgccggggattcactggccggaggctatgactaccggggagactgccgctggcatctggtagagccgtttatatttgacatgaagcctgcggcaaacggccgcatcctcattggctccaaccggcttttaaacatgccttactacacggcgggtgtttgtgaaatggacctggtgggaaaaatatatacggagtactgcattccgggcggctaccatcacgaccagttcgagatggaggacggaaatctgctgatcctgactcaggagaaaaatgcagccacagcagaggacatgtgcgtgctggtggaacgggaaagcggaaaaatcatcaaatcatgggattacaaaaaggttcttccccaacaggcggcgaagtccgggagctggtcggaacacgactggttccacaacaatgcggtgtggtatgacaggcggacgaattccctgacactctcaggcagacatcaggatgcggtcatcaatatcgattttgagacgggagaactcaactggatcatcggagacccggaggggtggccggaagatctggtaagccgttatttctttaccccggcaggcagcggtgactttgactggcagtatgaacagcatgcctgcatgatgcttccggatggcgatattatgatgtttgacaacggccactggagggcaaagaataaggagcagtacaggctcaaccgggataatttctccagaggagtccgctaccacatcgatacggagaagaggacgattgagcaggtatggcagtttggaaaagagcggaagaatgacttcttctcatcctatatttccaatgtggaatattatcgtgacggctattatctggtacattccggaggaatggggtataatcatggtgttacctgcgaggaacttccggtctatatgaatctggaggatccggaatgcgtattaaagagtattaccgtagaaatcatggacggagaactggtgtatgagatgcatctgccatccaattattaccgtgccgagaagatgagcctgtaccgggaaggtgctaatttagacctgggaaagggcagagtcgtaggaaatctgggagtgacaggcgagtttgatacggaggttccggcagagaacacaggggaactgcttccggaagcctgtgaggcggtgcttacggaagaggacgaccgcatcatttttaaggcgaagtttaagaagggacagctggtaatgttccagctggaaaaggaagatgatccggaggagatccaccggtatttcatctccaccagtgcacagaagtttctggcgatgtgttccggcaccttcctgcccaaggatgacagggaagtgacgttaaacgtcgacaaagagggcctgaacggcacctttgatgtgcgtgtcatcattgacgacagcaagtatgagaccgggctgaagctgaagttctaaatgatctggacaagtcgaagaggtcggcggtaagattctgaatattagaaaagtactatcaatacaaaggggaagtgagcggacaatgagtaagaaaataggaaagatactcggaattgtgctgggaaatgggatctttgcgctggggctttcggcgttttccatcccgaaccatttcctggtgggaggcgcaacgggaattgccagaagtgtacagcattttgcacatctggacgtgtcggtgacggtggcagccctcaatgtggttatgtttttactgggattttatattctgggaaagcggtttgcgctgaccaccattgtcagcacccttgtatttcccgtgtttcttaaccagtttctgaagattgaggcgttcagccacttaacgggggaccggctcctggcggcgctgtttggcggtatgctgacggggctgggactgggaatcgttatgcggctgggcggttctaccggcggtatggatattccgccgctgattctcaataagaaattccggattccggtggcgttgtccatgtacttctttgacattttcatcctgctgtctcagatgatattttccaatacggaagagattctctatggaatcatgtccgtactgctgacctccatcgtcttaaaccaggtgctggtgtttggtgccggtgatgtgcaggtgctgattatcagccgggagtatgagcggatcaatgagattatccagacggatttggaccgcggctccaccttcctgcccatccagaccggatttgaaaagctggatcagaaggcagttctatgcgtgcttccgaaccgggaaatgagccacttaaatcactgcgtgcaggagattgatccgaaggcgtttattatcatcaatggtgtgcgcgaggtaaggggacggggatttacgctggataagcatctggtgtgatgaggcagattcgacggattatggtgtgccgaaggacggtgcatgggagagattactgtacccggatgcagggggggcaggccgattcttaaacggaaccggcctgccccattctgcagtctgcatatgctgccggccgtgcaggagcagattcgcaactgtactggtacatgtgcttctgaaataaaaggacttcagcgactctgcatctattctcccataaccggcctgataaagaagcgcagaattgccagcgcgctggcgcccacggctccgtctgcggccccatacggcaggatttccatgttgcctgcataggtgcggtccacgaatatcagctgccgctcgatgtaatccatcagttcgttctgaatgtcctggttgtcaaagagctggccatgcagaaagatcttgcccggattggtgatgatggcgatattggaaatggtgatgcccaggtatttcagcgcctccgcgatatacattccgatgacgggatcgcccatggaataggcggtggtgatcgtctcgatggtaatctgggaatcgtcggatacgagacttctcaatatggtattcggcgtgttccggtacaacagccttgcgttccggattaagtggttttcgctggcgtacgtctggagacagccgtatttgccgcactcacagcggcgcccgccctcgcttacaatggtgtggccgatctctcctgccacataattttcgcccaggaacatctcgccgtctacgacgctggcgcagaacattcccatgcctacgtggaaaaatgcgaagctgtcggggctttcctgcggggaaaagagatattcgccaagggccatgcaccgggcgttattctcgcagacgatggggagtggaagctcctgttcaatccgcttcgggtcgaaattctgccaggtcttccggttggtaatcaggctggaagcgctcccgttcatgtggcctggaaccgctgctccgataccgacgatctcgtcccatgaaattccggactccgcgaccagatcctttacaccgccgataatggcgtcggtaattctgccggccagttcctcgttaaatggttctgtacgctggaaacggattcgtccctttaagtccgtgatacagatgacgagagccttctgggtaaactccaaaccgatgctgtaagccctgtcaggtatgatgtcgatcaggacacgcttgcgtcccgaggaggcctcatcggtcgagacctctcccagttccctcacaaatccctctgaaatcagcgtggtaacgttcatggttactgttgcaggcgtgatctcagtctcttcggcaatatccgttcgggcaatgggcgcgttccggtaaatacactccaatatccggctccggttggatgctttcttctttttccccttgtacatggctgcagcgacctcattcttccataattttcaaacacgctctggggcatgtcgtggttcttcccactctaaagtgtgctgatgagcggttcttccaacagaaagccggtgtatttggtggatacttcggtgacgcggtacacatcgagacactcctggaattccgtttcccgttcgcagatcatatgctggaactgccgccagcattcctgcgcttccaattcctctcccccggccagcttcatcagcgctttccctaatcgtaaactatattctcggtggtagtcaagatatttccaaaataaattttgtgcgtcggtaagactgtccgtgccttcctgcccggggaggggggcgtgctctgcgaggcggatcaattctttcatggcggctgcctctcttgggtccttccgatcctcttttccgttaaaatagtcgcagctgcacagggaggacagctttgttaaataagaaagaacctgttcccagccaggcccgtaggcggcacggaagtactcttccttcagctccccgaatgttacgtcggcgtcaaagagcatgcggcccatgacgtaagccggaaatgcgttggggaggcagacccggagctcctggcagctgatatagccgtccagtcccatctgtttcagcttccggatgtcctggccgatgatttcggctatatggatgtagccgaaatcaccgtaatgcgcccggcccagcggatagtcgtatacaaagccttcgccgtggaaacagttctgccatgattttaagaataccatgttctcatcaagccccacaggaagtgtgatccggtttctttcgtaggccggagcgggcccgtaggtatccttaagctggtaggaatgctcgaacgtacggctgatgggggcgaacatcaggagaaaacggtccggattgcggaaagcttcctttacaggcggccataagagctcctgatagagcagaaagacgatttttgtgtcaaggtgcagtccggtcagcttctcgtcgatccggtttaaaatccgtatgtactggtctgtgggcagttgggtccggcaggcctcgcactcgcagatattgttaaattcatccgccagccatacgtggacgcaggagatagccggatgttgtatacagtattccacaacccggtcggaaaatttttcgatcacggtctcgttggaatagcagagattggtgttcatgggaactccgtgaaataattcgcgttttccatttatgcaggcggcgagcggagcggtctccggcggaagcggttcggaagccgctttccagtcggcgcaggggaagccaagcacgtctccggtccagccgtggcctgcctgatggagaaggaggccgcgctcctgaagcgcttcttcgattcgggtggtaaaggcggcggcagtctcccttgtaaattcctccggcttcagaaggggattcatctcgtggtgataccagcgggccataaaggtatagggcagctggaactgcagaaagaagctgttgcagcccagcttcggcagccagtcgatgtaatccagaatattttccagagaattggctccctcgatgcagacgccccggtgacgcagcgccgcctgtttctgacagctggcggagagctgttctttcttatataaagaaggaaaggattcgtgcttcctgccgggagcggggaaacggcagccgagaagccataaatactggtaaacgccgagaagaacactgcggtcattgcttcccgagatggtgcctcccatcggggtgacgtcgatggagtatgcatcctcactgttcttcgggtttttcagcgattcaagccgaagcgtgacttcgtctgaccggcaattctggttatttgttataattattgaatccgcaactattttcgccaggcaccgggccagctcctgcgccgcaaaaacgacaggcgaaccggaatgcgaggaatataaaatgttgatcgtcataaaaatcctcctgaaatgcaactgataattaattatattttataagtattataacaaaaaacaagaataaaaatatatgtataaaatgcacaataaaatagtggaaaaagtgatgttataaacaaaaatacattatttatcgattatgtattgcatgaaatatagaaaagtgttatattgtaaccagcaaaagcaacgcctaattgattataaaaaataattaaaaggaagaaagagagggctttccatgaaaggacagttttcaggtgcttcgaaggtcaggttaacggaccgcagaaagaagcagagaaggcgcataaacatgtggtgctggatttttatgattcccaccatgatactctacatactgtttcaggggtatccgatactttccagtattttctattccaccctggactggtcgggaatgacatcaaacgccctgttcatcggactggacaactttaaagaactgttacaggacaaatacttctttaacgcggtggcaaacagctttaagtatatgatcatggccgttccgctgcagctggtgatttcactggcgctggcctacatctttaacagcatcttaaagaagggcgccacatttttcagaaccgtgtttttcctgcctgttattacgacggcttccatcgtgggaattatcatgatgtttatcttcggcggcacgggttccatcaatcagtttctgtctctcttcggagtgaggggattgaactggctgggcaatgccaacacggcgctgatcgtggtggtgctcatcggtgtctggaaggactcaggtacctttatgatctactggctggcggcgctgcagagcgtatcccaggatgtctatgaggcggcgaccatcgacggtgccaacaaatggcagacctttctccacgtggtcttccctctgattattcccatcggcggcgtgattaccgtgctctgtatcatcagctccttaaaggtgttcgacttaattcagaccatgaccaatggcggaccgttttattccacggacgtggcggctaccttcgtataccggacggcttacgcaagcagcagcggaatgcccagactgggttacgccagtgccgcggccatgacatttggaatcatcgtcgtggtaatcggaactgtgggcaatgtggtaaagacagcgttccagaagaagaacgcgatataggaggaacatatggaaagaacatcgattttaagtaaggtggggaagaccgccctttacgcggtcctggctgtggcttcctttctgtggatttacccgtttctctggatgatttcggcctccttcaagacgcagaatgaattttttgcaagcggactgaacctgattccccagtccttaaacctggataattttatccgtgcatggaacaatgcgaatttcggtatttactttaaaaattccatcatcgtgacggtatcggttgtggtgattgtgctcttgagcacctccctggccggatacgtcatgggccgctattcctttgtggggaaaggcctgattatgaaaatatttatggccagcatcacgattcctctggtgtttaccgtgatcccgatctacgagctgttaaaaaatatgggcctgtcccagagcctggtgggtctgatcctggcggagtcaggcggcggccatgtgatcttcctgatgctgttttccagcttctatgcctcgattcccaatgagatggaagaggcggccaccattgacggtgcaaatttcgtccagacctatggaagcgtcatgtttccactggccaaacccatcatggtaaccgtggtgatcatgcagtttatctggacgtggaattcctttttactgcctcttatcattacgcttaacaacccgtccctgcggacgctggcggtggggctttatgccttacggggtgaaaatgtggttgactggaccggaatagccgccggagccagtattgcaatcgtgccggtgatctgtgtgttcattgcactgcagaggtattttgtagacggaattgccggagcggtaaagagctgagtctcaaaacagagttcagaaaatggaagcaaagtaattcaaagaaagaaactcaaattattaaagaaactcaaataaagcctgcaaataaaaagtcaataggaaaatgaaaaattttcaaaatttattgttgattgaatttcaggtacaacaaatagaccaccgttatccgctggtctgaaaggatgtggtatcccttattctggaagagacataagatattcttttactcttccgtaatagattcgcagaaacttattggcgcctgcggtcatgtagacatagtaaggctttccctgggcacgtttcttatcaataaacgcatatacagggtcatcctgcggttttgttttgatgagacagtccatgacctggaataaggtttttctaagggaagatgagccacgtttggaagttggaacacttttttgttcataggttcctgattcattgacatctgggtctacaccagcaaatgcagtgatagcccctttatgggagaaacgtgtgacatctccgatttcagccataagctgggggccaagagacggaccgacacctttcattcccataacgacgggatattcaggcagcttggcggctgtttcattcattagggtgcggagttcttccacggtcttggaagcagtgtttaattgttctatggcctgcttcacgatcagcttggttaaatcatcttttggaagtacaggaacaagctccctggcagctccatagatttcttcagctttatctctgctgaagttgtacttcttacgtttgcaccatttctgataatggtcaacaaatgcgtttaatgacattttacgaacacagtccacatgccagtatgcagcggcaaaatcaacccacttctggctgccgtcctcacgggcggggctgtcaaagtaagtattaacccccgggtaagtctgatcaaggataccgatgaggttattcttcatagctgttttgtgtttcatatagaacccaaactgacggttcatagtctttaattgattgcgtatttcgtccataagactatattgtttcaattccgtccaactgtcaagagtgtaacgggctatttttacagcatcagctttatccgatttcactttacggagagaattgtctccgaaatccttaatgagtttaggatttatggcagtcacaaaaagacctgccagagagagttcacgggccagaggctcgtaatagtggccggtgtgctccataacgatgcgggattccccttcgatggatttgatctgttgaatcagagattggatgttaccagaggtatgcttgatttcaaagggcgaggaaacaatttccccataagggcgaagaatagcggccatgcttttgcctttggatacatcaataccaactgcgttcctgttcataaaattgtcactccttaagattattgcaatggataagtaccagttttactcattgcctattccatctactgtggtgtgacacgaacgtaccgaaggcagttcaacctgcataaaacgaacgctgcgaatgaggagctggttatcagtcttaattacggacgcgaggtccaaggaggaaaccgatataccgattgctccatcattataacagcttaagcaacaagatggataattccttactggctgtaagggatattaaccataaatacattgtagtaggaggatatattttatgagaaaagtaaagagagcccttgcggcagcgctggccgtgcttatggccggttccttaagcgcctgcggagtcaatgtgcagacgaaggatgacgcgaatacgacggcagccgtgacagaggcaaaggaagagaccagcgcggtggatacgccggccgatgagaaggtgacgcttaagatcattgactggagcgacagcacaaaggaacgcagggaagccttccacaagaaatttatggaggagaatcccaatgtcacgattgaatatacggttctgactgcggatcaatttaaggaaactgttatttccgccatcaaggcggggaatgcaccggatttattcccgcttccttccggcatgaagctgagtgcagcgctgaaggaaaactggtttatgccgatgaacgattacgtatccgatgatttcctgaattcttttgcggatggcgcgctgaatgaaggaattacgacgattgacggaaagacgtatgtacttccggaatcggccaatatcatcaatacccttgtattttacaataagaatgtgctgaaggaggcgggaatcgatgagagccagcttccgaagacacgcagcgagttcctggatgtctgcaagaaggtgagcgatgccggaaacggcaggttctttggaatcatcgacagcggtgcgcaggccaaccgtctggaactggctctccgttctctggccagcttagatggcggcaagtgcagcgatatctcccagatgattctggtggatgggcagaatacgctgaattccgaagcgatgcagagcgcctatgaattctatgatacgctggtaaaagaaggctgcttccatccggacactgtttccatcaaggctccggaagcacgtgcgctgtttgcacagaatcaggcggcatttatcattcagggtgcatggtgtatctctacatggcgcaaggataacccggatctggatttcggcgtgatggcgcttccggcaccggatgatggaatgaagggaaagcttccttatatcggagcgcagccgtggatgggaatttccgccaactgcaagcatccggatgtggcggccaggtatttaaccgaactctattctgaggattatcaggcgggtctcgtggaagacggcggattcgtatcggttatcgatgcggccaacaaggctcatatgacggatgacgtcatgcttcagtattacaatctgaacaatgaggtagcggcgctggcgccagatcccatcgtgggaaatccggctgcagccgatgtttacgcagaggtatccgcaatcactccgggacttggggaaatcgcacagggtattctggcacagaacatcgattataagacagagttaaagacactctccgacaagactcaggaggagtggatgagagccatcgatgccgcaaaggcgaagggcgccgatgtgtctgccgacgattttgaatttaagaactggaatccgatggagaattacacggcggatctctatgagagcagatagaagactgcctgttatgaaacaagaataatttttttgcattgctgcatactgttaaaaaacgttccggttggatatgagccggaggaaacggagacggtatacagcatttttatgaagtctattatgagccggatatagtaaattaccagttggggagggagttgagggagcggtttaaagatctgccctggattcccatagaaagtcataaccggattcccgagatgcaggagaaaccgaataaggaattcggccggatgaaacggaacctgattattgggaccagaaagacccataagtatgtggaaaatcacaaggtgtccgattatctggttccctacacttcctccggctgcagcgccatgtgtctgtactgctatctggtctgcaattacaataagtgctcgtatctgcggctttttgtaaacagggagcagatgatggaccggctgataaaagtgtcaatgaacggtgagaccgggaagacctttgagatcggcagcaacagcgacctggttctggaaaataccattacaggcaatctggagtggacgatcacccagtttgcccaacgggggcggggccatattacatttccaacgaagtttcatatggtggagccgctgcttgacttagatcaccggggaaaggcgattttccgcatgagtgtgaatccccagtcgataatcagcagaatcgagctgggaacctcgtccctgatgaagcggatcgatgcggtcaaccggatgtgtgacgccggatatccctgcggcctgctgattgccccggttatcatcatggaaggctggaaagaggagtaccggacgctgcttcagacgctgagagaccatctttcgccgaagatgaagcgggagatgtttctggaagtaatcctgatgacatacagctttgtgcaccgggccatcaatggagaggcatttccggcagcgccggagctctacgataaggaacttatgacgggccgcggccggggaaagtactgttaccgtccggaagtgagggcagatgcggagcaatatctgcgggaggagataaaaaaggcgctgggggatgtggagattttatatattgcgtagcggtggggtgtgaaatataaaatggcggaggcacgtttgcttccgctttttttccgcattctgtaaattgcataacgggattgatgacatggtttggctgtgttatactacatgggataaaagaaagaacgttccggccggtatatcggaagacagaaggaagtcctggaaggaagtgtggatcaatgatgaagcgaaagaatccgatgaaatacgtggttttgataggggcagtgtccgcgggactgctgtccgcctgctcgcacggccagacggcagaggccgcgaaagcggaccggtcttccgcagaggagccgcagactgcggaatcctttacggtatctgcggctgagaatcctgtttccgctggagagacggaaagcgccgaaatggagagtgctgaaatggagagcactgaaatgaagaatgcggaaatggaaaacaccgaaatgggaaatacgctggatgacagccgtatcattaccggacagagcttcgacgttacatggaaaaactggggagaggtccgttttatctcctatgcgccgccagcggatcatgctcatgatgatgtgaaattctatttgagtaaaaataatgaaatagtatatgaatttccgaaggcgtgggctgaaggctctttaccctggacctttgaatcggtggatatggtatcatttcgggatattgacggtgacggatatgaggatgtgatcaccatcatttcctatataacaggggcaggaactgaggcaatggttccatttccaactacacgaattttcctgggggatggaacgaaatttgtgctcgacgcagaactgtcggaagcggttgataaggctcaggccaatgaaagcatcagcaccatcatggaatttataaataacaggacctcccctgacgccggttattcagagagcgcaggcggtgaggaccagatgtatgaaataaccggaatcagagaagaggaagcgaaggctttcctgaagaaattcgcggctcacgtaaaggcaggggagaagaaggaggcctcccggatgatcgcatttccgaagaaagtggttctgccggataagcaggtgactgtccagagcccggaagagtttttggcgtattacgatgagatcttcacagcggattatagggaacgcatcggtcagctcatggcggaagacgacgtctggtggagctatcggggcgtggccgtggggaatggcgaagtgtggctgaatgaacgagatggcactctgtggattgaagccctgaacaatggggaagaccgtgccgtccaatatccggagaatacggggattcaggcagaataagggtaccggcgcggccggttctaaaacagaaggagagaggcaggagtaaatggaaaatcaggaacagacacataagcgcagggtgcggtataaagggacccacccgagaaactataaggaaaaatataaggaactgcagccggagaagtacgcggatactgtggcgaaggtggtgagcaagggcagtacgccggcggggatgcatctctcgatctgtgtacgggaaatcctcgatttcctccagattaagccgggacagaaagggcttgacgccacgctcggctatggcggccatacccgggaaatgctaaaatgcctgcagtcccaggggcatctctatgccctcgatgtcgatcccattgagctggcaaaaacgcgggaacggctgcagagccagggattcggcccggaaatcctgacgattattcaggagaactttgcaaatattgaccgtgtggcggctgaggtgggaccttttgattttgtgctggcggatctcggtgtatcttccatgcagatcgacaatccggaccgcgggttttcctataaaacggaggggccgctggatttacggctgaatccggagaagggaatcacggctgcggagcggctgcagacgatagaggaggaagaactgcgggggatgcttctggaaaatgcggacgaaccatatgcagaagagatcgccagagctgtggtccaggaaatcagaaggggcaatcccatcgataccacgacgcgccttcgccaggttattgagaaggcactctccagggttccggcagcagaccggaaggaggcggtgaaaaaatcgtgccagagaacgtttcaggcgctgaggatcgatgtaaacagtgaattcgaagtgctgtattcatttttggagaagcttccggatgtgctggcaccgggcggccgtgtagcggttctgaccttccattccggggaggacagactggtgaagaagtcctttaaacgcctgaagaaggaaggtgtttacagcgagattgcggacgaggtcatacggccgtcggcggaagagtgtctacggaacgggcgggccaggtcgacgaagatgagatgggctgtgaaggcgtgatcgtgcagaaggcttttcactcagcggcgcaggcgtgtccggatacgagtcagtgcctgtcattttttgcaggataaaacagcgaggttatgggaatggagagaatggacgcactgctgtatgactgtgatatcagggagccgttgtttgactacctggaagagcggtttgggaaagcgaggatgttcgaggagaaaatcattggaaaatcgagagcggatgtgctgatggtgacggagcgcagaatcacggggctggagatcaagagtgatgccgacacctacgagcgcctgaggaggcagatccgtgattacgataaatactgtgacgagaactacgttgtaatcggcagatcccatgcgaagcatgtggaagaacatataccggcctactggggagtgctggttgtttccgtaaacggcagggatattgtgattgaggagatgcggcccccacagcagaaccccaaaatgaagcgggaactgcagctcgccattctatggcgggcggagctccagaatattatcgaacagaaccacctgccccattacaggcagaaaagtaaacggtttgtgagagaaaagctgctggaaaaactggagtgggatcagttgaagctggaggtctgcgaggaattgtttcagcgggattacacgcttctggaggaagaagaggagtaaacggaggcgaaaagccggggagaatcatcagatggactgcaaggataaaaagaaactgcttttaaatttggacaaacttcataccacggatctgggggtgatgcggattcggagaaatctgtcactggatgcggaggatgccgtggtatggtgccgtgaaatgatcgggaatcccaatacctgtattaccagaaacggaaaaaactggtatgccgaaaatgaattctgcatcataaccgtgaatgcgttcagctacacgattattacggctcataggcgcaagaaaccatcgtaaggctgctgctgcagctgactgcaatcggattcctgagttatttcattctgccgcgtttctgcgggcttttccacatattcaaaaggcgtttatggaaacaatggacagaacgtttatatatacttttgattacataaggcatttttcatccgtataatctgcaaaaaaaatattacaaggtaccttgacaaatgctgaaataagatgtaatatcaatattgcaaggtacctaactatttgagttgcaatgatacagaacaggaggatttatatatggatgaaaatagaatgaactgtccgtgctgcccgaaccactgcgaagccggagcgctacagtgtggaaaagggcgtgcatactttagtcaggaagaaaataacagaagcgggcgaacggaagagtgtggaagaaacgacagaagcagacataacggcagacaccatgaatcggtgagtcatgcagaagcagatagcagaaccgatctgccgcgcagtcacactcagggagaaggacgtcaaagtcatggcggaagagaactgggagagctgcgaagatgcagaggaatggaagcgcatggaagaaatggggaaatgagagaacaccgctgccgcagctttggaatggaagaaaagctgcagggccagcttcgcgcctgcggccattttctgcattataatatgggagagaaggcagggcaggcaagaattctgtctgcactgttggagagcggaaccattacccagcgggagcttcaggatattctggaggtgcgttccggatctctgagtgagattttaaataaggtggaagccaatggatttattgagcggagccagagcgagaatgaccggcgccagatggaagtaaggctgacggaaagcggaatggaaagagcctccagactggaaggcgagcgtgaagatgcggccgccggcctgtttgcctgtctgaacgacgaggagaagaaaacactgtcggagcttctggataagctgttagacggatgggaaggtcaggagcgcggacgaggccggggaggccggggacgcggcaggcacatgcatggcaggagcggtgacgagatgcagtagcctatggtaaatctgcacaatacacagacgattactcatcgatagtttttaacaaactttttcccaacatcaaaaaaacgctgacattttacatttcaaaatgctaaaataaacctatagaaaagggaggttttagcatgagacgaattataagcgcatgtttgctgcagccaatgagatttgatacgacgaaggaggcggatccggaacaggattttgccatcttctgtaaaaagctcgataagagcagtgtgaactacgtcattgaagagaagacgaaggaggcggacggctccctggtggtaaagatcaggaaacagtacaattcctacagtacggatggatacctgcagtaacaaaatggtgatgctttggaatcattgaagttccaaagcatctgttttaatttctgcaggcagcgttttttgttttgacttcaggagggaaatggatgttttcggtaaatgattacgttgtatttggaaatcatggaatctgtgtgataaaagcgatcggtcctctggatttaggcattgcggaacgagggcggctttattatacgctggaaccgctgtatacacagaaaaataccatttacacgccggtggacagcgaaaaaaactccttacgccgggcaattacaagggaagaagcgctggaactgattgacaggatcccgcaggtggaaacagtctgggttccggatgaaaaaaggcgtgaggaaaggtacagggaaatcatgaggcagaatgactgtatgggctggatgcagattatcaagaccctgtatctgaagaagcagaaacgtctggcggagggccggaagaacacggcgcgcgacgaactgtatctcaagctggcagaggactttttatacggagaatttgcagctgcgctggatgtggaaaaggatgaggtggaagacctgatcggccggagagtgagggaaatggagatgtgtctgtgaagattataaataagaaggtagagcataaaaactatggagcgggaacgatctgtgccatgaacggcggcagtgtctgcgtcgagtttggaaagctgttcggtatgaagcgtttcccgtatccgcaggtgttttctgaaggaaccatgaagctgatggacgaggcgctgcaggaggaattaatggaagacctgttgacttaacgcctgtccggcaggaagaatctggagaaccgaaggaagcggctggatcggccgctgtgccagcagagatgatactggcgcagcggcctttttattgtgcaggaaagtccgcgtcctctaactggtaagggccttttggatatccgtgagctctgcaataagctctacacatcgctccaggcccagctttccgctgttcagggcgatatggtaattggctgccatgccccattcccggccggtatagtacctgtaatagacagatcgcttcttgtccttctcttccagacgtttcaacggacttttttccgattccccgtaaagacggacgatacgttccgcccggatgtccgcgtcagcatggacgaatacattgaggcagtccgcccgttcctttaaaatatagtccgcacatcttcctacgatgacgcaggggcctttttccgccaggtccaggatgacatttctctggattacccacagaaaatcgtcggctgacattccgttcatggcgccgttcattcctctggcggcgaaggcatacccgaagatgcttttcgagggggcatcctcgccctgcttctcgatataggattcgtcaaatccagtctctacagctacctttttgaccagctccttgtcataataaggaattcccagcttttcggctgtcattttccctatggtgcgccctccgctgccgaattcccggctgatggtaatgattcgattatccatgtgttttgacctccattcgctttaaacatttatattcatgtgagactagaataattgtaagaatcagagagagtacatcggcgatgggagccgcccacagcattcccgtgacgccgaaggccatcgacagcaggatgacgcccggaaccaggaaaatgacgtctctggagagggaaaggactgtcgccttcaccggttttccaatcgactgaaggaaaatactgcttgccttctgaacacagcagagcagaatgccgcccagaaagatgcggaagcacatgtctgcgtattcattataaagactgctttcactgccgaagaggctgacgatggcctgagggcagaattcaaagagcagtgtggcaatgatgcccaccaccgcattggccgcgataatatggcggtacgtatcgaagacacgcttaaaattaccggctccgtaattatatcctgcgacaggctggccgccgactgcaataccgactgaaaatgcaatgacgatgccaaataccttcataacgattccaaccaccgaaagcgggatatcagctccgtaaatggatttaggtccagcgagcccgatcatgttattggagacgctcataacgatgacaatagcgatctgtgtgataaagctggagattcccagctggccgatctgccccagcagccgccaatccggaagaaaactggtttttgagaagcgaaaggatttcggtttccggaaatacaggatggtgacgaagcaggaagctgcctggccgatgactgtggcgatggccgcgccccgtacccccatgtggaatacgaagatggcgaccggatccagaatcaggttcagcacggctccgatgaccgtgctgaacatggaataggcgggggagccgtcggcccggatggccgcgttcatgccggaggcgaaaatatagaacgggattccgatcagaatgacctccatatattccctggcgtagggatagctggcctccgttacgccaaacaggcggagaatctggtctgaaaacagaaagccggctgcggtcatcacgataccgatgaatacggtggccaggattccattgccgatgcatttgtggctggtttcctgatcgccgctgcccagggtgaggcttaatttggccgcgctcccatctccggctaaaagagccagggccagggaggccacggtgaagggatagacaacatttgtcgccgcgtttccaaggtaaccgacgctctgcccgataaagatctggtccacgatgttatagagggcgcttaccagcatggatagtacacagggtactgaaaatttcagcagaagtctgccgattggttctgatgcaagactggcgtttgcatctcgttttgtctctgtcatagataatcactccttataaataaaaactgcgcgtaatcaaaacggaagaattccgcttatagactacacgcagatattgctggatttacatctattcagattatacgcacatggctgaaacggaaagggtgcatttgtttccgtctgcggaccattataaccgatcgacccgtacggatgtaagaaaaaaattaaatttttttaatttttgtgaaaaatgcgcataataagaatataatatcgctgcagaaaccggcaggagcagagagcagaacacagttttataatctatttttcacaaaacagtcacagtccggcattataatgcggtttagtaaaagaaaagactgcgacaggaggaaaaaaatatgagcacagagattataaaacaggaagaaacaaatggggaaaaggcagcggttctctcttttctcctgatatcagccgcgtttctgatggcggagatcgggctgatggatatctcgttattaaaagccccggagctgatccagtggatttatgataaggtgacgcttccggagagtcttctgtttattacccatttaaaagggctgttcggatttgccgtgatggtgatcagctgtctgccggcgctggtcctgatgggaatcacgggagttgtgatgtcgaaggcagcggagaagtagcaggaaagctatttagacatatttcataaaaaaacaggcggaattccgttaaaaatcccctgtgcaaactaatatattagtgctaatatattagtatacggcagatggtggtcaactcagaaacaggcaggaaagctgtaaaccaattttatttatcatcaggagggaattcatatgaatatgtcacttcgctggtatggaccaggctatgacaccgtaacactggaacagatccgtcagattccgggcgtgaaaggcgttatcacaacactctacgggacccggccgggagaggtttgggagagagaagagatcagaagcttaaagaagaccgtggaggaagcaggactctccattctcggaattgaatcggtcaatgtccatgacgatatcaagactggtgcgggagacagagaccgctatattgaaaattacatcaaaactctggaacgtctgggcgaggaagacattcacatggtatgctataactttatgcctgtgtttgactggacccgctccgagctggccagaaagagggcggatggctccaccgttctcgcctataatcaggatatcatcgatcagatcgatccggagcatatgagagaatccatcgaagccatgtccgccggctatgtaatgccgggctgggaaccggagcgcatgggcaggctggccgagctgtttgcgatgtaccgtgaggtcgacgaggagaagctgttctccaatctcgtatattttctggaagccatcgggccggtctgtgaaaaatatgatatccgcatgggaattcatccggatgatccggcgtggccgatattcgggcttcccagaatcattacggataaggctcacattgaaaagctcttaagggcagttgacaggccgtataacgggctgactctctgcaccggttctctgggatccaatcaaaagaacgatattccgggcatcatcgaggccgcgaagggcagaattgcatttgcccatgtcaggaacttaaaatataattccgaacgggattttgaggaagcggctcacttatcttccgacggctccatggatatgtacagaattatgaagacgctttacgataccggatttgacggggtgatccgtccggatcacggccgggcaatctggggggaagaagcaatgccaggctacggtctgtatgaccgggcgctgggggccatgtatttacagggcttatgggaagcgatcagaaaaaatggctgagaaggatacgaaaaaagctgctgcagaaatccctgccgttaagaaaaataccatgaagacagcagagacagcaaagacagcagaaaaggaaaacagcggcagtcgggaagatcggatgtacgacgtactgcgggcggatatccttgatttaaaactgagacccggtctggtcttcagtataaaggatgtctgcgacgcatatgaggtggggagaacgccggtcagggaagcgctgatccggctgtccaaggaaggcctcatcacttttttgccgcagagaggtacgatggtatccagaattgatttccagagagctgacaatgagcggtttctaaggagctgcgtggaagaacaggtcatgctggaattcatggcgttaagcggaccggactcagcggctgccgcggctcttaaagaatccttagaccggcaggaaaaaattgtgaaagacagggactgccgggcatttctggaagaagatatggtgttccactctgtgttttaccagggcgccgaccgggaaacctgcgcccggattattcacgccaattcaggagattaccggcggatccgtctgctgtccttaacggagaccgggatcagcgacggagtcgtgcggcagcacagggaacttatggaggccgttctgatgcgggacagggaacgggtacaccggctgctggctcttcatttaaataagatggtgaaggaagaacggttcctgatggagaaatatgcggaaagctttacaggcggcgaagcagtggaaaaacggagaaacgacggttttgccacggattttctggctggctgccttcactagtactgcatagcgtgtgtcggaaatttgccttcttaaattgccatgatacggcgctaaaataaacgagagaggtgtaaacatgaatttaacagatacaggattacaggacaggcaggcatgggagaaagcggggattgccgttccaacctatgacagggcggcaatggtgaagaggacgaaggaaaaccctgaatgggttcatttcggcgcaggtaatatcttccgcggctttattgccaatcttcaggacgcgcttctggaggccggtctggccaaaaccggtattattgcggcggagacctttgattttgacattatggataaaatctataaaccatttgacgatctggccctgttaattaccttaaaggcggatgggagcacggagaagaaggtgattgcatccattgcggagggcgtgaaggcggattccggtgatccaaaagagtggcagcggctgcgcaccatatttacaagcccctcccttcagatgatatcctttacgatcacggagaaaggatatgcactgaaaggggcggatggaacgtattttccattcgttcagaacgatattgataatgggccgaaggagccatcctgcgccatggcagtggtctgcgcccttctgctggaacggtaccggcatggcgccgcgccgctggctgtcgtcagcatggacaactgctcccataacggagagaaactgcagaattccattctcaccatggcggaggaatggaagaaaaagggatttgtggatgacggcttccttgcatatttaaagaatgaagaaaagattgcattcccctggtccatgattgataagattacccccaggcccagtgccgaactggccgggcagctggaagctgacggagtctcctccatgcagccggttatcacctctaagaggacgtatattgcgccgtttgtcaacgcggaggggccgcagtatctggtgattgaggataaatttccggcgggaaggccggcactggaaaaagcgggtgtctatatgacggacagggatacggtaaaccgggtggagcgcatgaaggtaacaacctgtttaaatccgctgcacacggcgctggccgtatatggctgtattctgggatacacttcgattgcggaggagatgaaggatcctgaactgaaggccctggtagaaaaaatcgggttgacagagggcatgccggtggtgacggatccgaagattctttcaccggaagcgtttgtcaatgaggtcatctgcgacaggcttccgaatccgtttataccggatgcaccccagagaatcgcaagcgatacgtcccagaaggtgggaatccggtacggggagacgatcaaatcctatgtggaacgatatggggatgcgaagaagctgacctttatccccctggccattgcgggctggtgccgttatctgctggcggtggatgatgagttaaaaccgtttgagctttccgccgatccgatgattccggagcttatggaatgcttaaagggcgtcgaggcagggaagcctgagacgtatgcaggacagttaaaaccgattctgtccaatgagaatatttttggcgttaacttatacgacgccggaatcggcagcctgacggaagccatgttcctggaggagattgccggggcgggtgcagtcagagaggcgcttaagaagtacctggtataaagataaaggaataagcggctggtgtccagcctgcttattccttttttcacgattaagtatacctgcggacccgctggccttctcctagattgcaaccggaatcttatccgtaaacgcatggtactgataatcctccagccggaagctgtcctttgtgaagctgtaaaaatcatgaatttccggatccatgataaacttcggcgcgtcatagggcgttttttctatcatttccttcacgatcggtacgtgtctgtcataaatgtgggcatccgcaatgacatgaaccagttccccggcctgtaagccgcttactgatgcaaacatatgcagcaaaacggcgtactgtgtcacgttccagttattggcggtcagcatatcctgagacctctggtttaaaattccgttcaatacattgccggaaacgttaaaggtcatgctgtaggcgcaggggtaaaggttcatctcatgcagatcctggtggttgtacaggttcgtcataatgcgcctgcttaagggattattcttcagatcgaagagaacccggtccacctgatcgaattcgccttctttatactgatgccggattcccagctggtacccgtatgctttaccgatacttccggtttcatcagcccaggaatcccagatatggctgtttaaatcatggatgttatttgattttttctgccatatccagagtaattcatcaatcgcagatttaaaagcggttctgcggagtgttaaaatcgggaactcctttgataaatcatagcggtttataattccaaattttttaatggtatgggcgggggtgccatcctcccagaccgggcgcactaagctgtccgtatcccatacgccgtctgataagatttccctgcaattctgtatgaataaagtgtctgcgtagctcatgatactcctccgttagtggtaagtgattctgtaaccggcggcaggacctgttatttcttgaaatatacctgcaaccggctccattataccagatgtccaaagattcgaacaggtcatctcatgaaaataatttgcaaaataaatatatttgtatataatgaagtttagaaacaggacaggaggaaactacatgaaagcgattgtggcagttgacgaagcgtggggaattgggaaagacggtaaattattgactcatcttcctgaagatatgaaatttttcagaacggttacaaaagggaaagtggtcgtcatgggcagaaaaacgctgcagagctttccggatgcgaaacctttaaagaaccggatcaatatcgttctgacatcagacacagccatgaacggcgaagggcttatcgtctgccgcagtgtggaggacgccttaagacagctgaaggaattcgacagcgatgatgtctatattattggagggcagagtgtctatgagcagtttcttccatattgtgatacggcgtatgtgaccaggctgaagcgtgatttcggtgcagatacctggtttgtgaatctcgacagacaggaaggctgggaagagactgaaaccggggatgagaaagagtatgagggactgcattttgcattctgtacttacaaaaaccggaattgccaggattggtagaatcagaacaggacggaggacaaaagaatgttaaaatgtgagagaacaagcgtaatgaattttgaaaatgcaatccggggagcgagaaatcccatgaacagctgggggcgaatggacagcggctacgatgaagaagggaattttgtgctgggtcccaatgatatgagcctggccagacggttaagaaaagcgggcagtgatcaccgtaaatacgtccggcagatttttgtatctgtggatattacggccccgctgtactggtggaaggagtatgatacctataaagtggccaccgtggcaaactcgaccagtacgatgcataagattcacagcaaaccattttccatggatgatttcagccatgatcatatgactccggatacgctggagtttatgaatcagatggtggagtacttagaaaaggtgcgcagccgctatctggagacgaagagcagggacgactggtatgatatgatccagctgcttccatccagctacaaccagatgagaacgtgtaccatgaactatgaatccttaatcaatatgtattttgcgagaagaaatcacaagcttgccgagtggcatacattttgcggctggatcatgacgcttccttatgcaaaagagctgattgccgcggaagaagaaaacgaagaagcgtgatccgcttcgctgaaagagaaaagaggtcatcatgaacatattagtaaccgctgacaaaaactgggccatcggaaatcagggccagctcctggtctccatcccggaggaccagcgccttttgcgggaggagactttagggggaatcgtcgtgatgggacggaaaaccttcgagacgcttccgggaaagcagccgctgtataaccggatcaacgtaatcctgtcgaaagaccggaattacagggtaaagggcgcagtcgtctgccattccgtggacgagacgattgaatttctgaaacaatatccccaggcctccgtattcatcattggcggcagcagtatctacgaccagttcctgccttactgtgatacggtccatgtaaccttcatcgattatgaatacagtgcagacacccattttcccaacctggacaaatccgaagactggagcctggcggcggaaagcgacgagcacacctactttaatctgtgctacagtttccggatgtatcggaagaaataagggatcattatcctttatttttgagaattcatattgtcaggttggaatttggatggtaagatgatatgagtaccatttctcctgattgttggggaaggctatcaggaaaggcgtacaggtataattcaccaaaagaattaggaggatgaagatgtataggattttaaaagcagagaaattagctgacaagatctatctgatggacgtagaagctccaaggattgctaaagcctgccagccgggagaatttgtaattgtcaggatggatgagaggggagagcgtattcctctcacgatctgtgactatgatagagaaaagggaaccatcaccatcgtgttccagatcgtcggagccagcacagagagaatggccggtttgaagacgggagattccttcatcgatttcgtaggacctctgggtaatccgtccgagtttgttcatgacgattttgaagaagtaaaaaacagaaagtatttattcgtagccggcggcgtgggtacagctccggtatatcctcaggttaaatggttaaaggaacacggcgtttccgtcgatgtcattatgggatccaagacaaaggatttactgattctggaagacgagatgcgtgccgtggccggtaatttatacgtcaccactgacgacggttcctatgagagaaaaggcatggttaccgaagtgattaaggacctggtggtaaaccagggaaagaagtacgatgtctgcgtagccatcggaccgatgatcatgatgaagttcacctgcctgatgacaaaggaactgggaattccgactatcgtaagcttaaatccgatcatggtggatggaacaggcatgtgcggtgcctgccgtgtatccgtgggcggagaagtgaagtttgcctgtgtggatggaccggaatttgacggccatctggtgaattttgacgaggcgatgaagagacagcagatgtataagacggaagaaggccgtgcgctgttaagacttcatgagggtgcgacccatcatggcggatgcggccattgtggaggtgacgagtaatggatatgatgaagaaagtgcctgtcagagagcaggacccgaaggtcagagcgacaaatttcgaagaggtttgtcttggatataatgaagaagaagcgagggcggaagccagccgctgtttgaagtgcaagaatccgaagtgcgtgggcggctgtcccgtatccatcgatattcccggatttatcaaggaagttcaggaaggcaattatgaggaagccgcgaaggtaatcgcgaagtcttccgcgcttccggctgtctgcggccgtgtatgcccgcaggagagccagtgtgaaggccagtgcatccgcggaattaagggtgagccaatctccatcggtaagctggagcgcttcgtggcagactggtcaagagagaacggcttcgttccggcggctccggagaagaccaacggcaagaaggtcgctgtcatcggttccggcccttccggtgtgacatgtgccggcgatttggcgaagatgggatatgaggtgacgatttttgaagccctccatgagccgggcggcgtactgacatacgggattccggaattccgtctcccgaaggaaggcgtagttcagcccgagatcgataatgtgagaaagctgggcgtaaagatcgagacagacgtcatcatcggcaagtcggtgaccatcgacgaactgctggatgaagaaggcttccaggccgtatttatcggttccggagcgggtcttccgatgttcatgggaatcccgggagagaacgccaacggcgtattctctgccaatgagtatttgacgagaagcaatttaatgaaagcgttccgtgatgattacgatacgccgatcgtggcaggaaagaaagtcgcggtagtcggcggcggaaacgtggcgatggatgccgcgagaacggctcttcgcctcggcgcagacgtacatattgtatacagaagaagtgaggcagagcttccggccagagcagaggaggttcaccacgcaaaggaagagggaattatcttcaatcttctgacgaatccggttgagattcttacggatgacaatggctgggtgaaaggcatgaagtgtatcaggatggaactgggtgagccggacgcttccggcagaagaaggccggttgccattgaaggttctgagtttgtcattgaggtggatacggttatcatgtctctcggaacttcaccgaatccgctcatctctgctaccacaaaggggcttgagacaaaccgcagaaaatgtattgttgcggaggaatcaaacggcaggaccaccaaggaaggcgtatacgctggcggagatgccgttacgggcgctgccaccgtgattcttgccatggaggcgggacgtgccggagcgagaggaattcatgagtatttgtccggacaggaagctgcggaataagaagcagcgatcagatagtaagataacaggatgcagagggctgccggcatggcagcccttcctgctgatatcctgtgttgtttgaggtgtgtatgagtaagaaaattgatttgctgcacggtcatatctttacgtctctgacgggactggccctgccgattatggccacagcgctggtccagacggcatacagcctgacggatatggcgtggattggcctggtggggtctcccgccgtggctgcagtaggagcagccagcatgtatacgtggctttcccagggcgtcgtggctctggccaagatgggaggccaggtaaaggttgcccattctcttggaagcgggaaaccggaggaggctgctaaattcgcggcgggtgcgattcagatgggcgttctgtttgcgctgatgtttgccgctgttacagtctttggagcccgtccgctcattggatttttcggattgagtgacggagccattattcacaatgcacaggtgtatttaaagatcacctgtggtttgattctgttttcttttttaaatgcgatcattaccggaattctgacggcgatgggggacagcaaaaacccgtttatcgccaatgtcatcgggctcgtcatgaatatgatcctcgatccggttttaatattcggcatcggaccgtttccggcacttggcgttaccggagcggccgtggccacggttacggctcagatgattgtaacaattgtatttctcgtggttgtgaaaaaggacaggctggtgttcgataaggtccggttcctggaacggattccgcgggattattttaaggtgatggtgcggatcggtcttccggccgcagtccagaatctgatctatacaagtatttccatggtgctgaccaggtttgtggcaggctttggagatgcggccgtggcggttcagagagtaggaagccagatcgaatccatttcctggatgacggcggatggattcgcggcggccattaattcctttatcggccagaactacggcgggcgccagtaccgccgggtgaagaaaggttatatgacggctgtcggcgtcatgtttgtatggggacttttctgctcgggggtgctgatcggatttcccaaacagatattcgggctgtttatccatgaggcggatattattcccatggggatcagctatctcgttattttagggttctcgcagatgtttatgtgcgtcgagctgacgacggtcggagctctgtccggtctcggcaaaacgctgctctgttctgtgatcagcgttgtattcacctcggcgagaataccgctggccatgattttgagcagttcgccgctggctttagacgggatctggtgggcatttacgatttccagtgtgatgaaagggattctgttttttatctgttttctgtatgtatccggaaagcttccggaggatggcgcacaggcgtcatggtgagtttagaagggggagtttataaatgaagaaaccgatgacacaggaggaacggtttgtacagatgattgaaacgccggtttccacgctgatcccgcggctggcggttccaaccatcatcagtatgctggtgacctcaatctataatatggcggacacctttttcgtcagtcagatcggaaccagcgcgtccggggcggtgggcgtcatgttctccgccatggccatgatacaggccatcggattcactctggggatggggagcgggaactacatctcgcgttccctgggagaccgaaacggaggggaagcggataaatcagcggctaccgcattttttacggcactgataatcggaatactcattacggtcttcggactgaccttcctgcggccgctggtattccttctgggagcgacggaaaccatcgctccctatgcgatggactatggaatctatattctgattgccgctccgtttatgatgtcttcctttgtcatgaacaacattctccgtgctcagggaaatgccatgtattccatgattggaatcactgcaggcggtattttgaacatgattctcgatcctgttttaatctttggatttcacatgggaattgccggagcggccgttgcgacgatggtgagtcagatgatcagctttggaatcctgttctatcagtgtaatttcagggaaggaagcatccggctgaggcttgccaattttacacccacctggaagatgtatggagagattctgcacgccggacttccctccttctgccgccagggtcttgccagtgtggcgacggtgatcttaaattttgcggccggaccgtttggcgattcagcgattgcagccatgtcgattgtctccagatttatgatgttcattaactcagctctcatcggtttcggccagggctttcagccggtatgcggctttaatttcggtgcgaagcggtatgaccgtgtgctggaggcgttctggttctgcgtgaaggtggcaattacgatgctgacctgtttcggaatcattgcgtttgcagtcagccgtccgattattaccgcattccgccgggaagatatggaggtaatccggatcggtacgctggcgctgcggctccagatcttaacgcttccgcttcaggcgtgggtgattatggtcaatatgctgacccagtccatcggatacgggttccgcgcttcgctggtagccatgggacgccagggactgtttttaatcccttccctgcttattctcccgagaatctgcggaattctgggggttcagctggctcagccggttgcggatgtctttacctttgtactggcgaccttcattgtgctgagagtgctggaggaattgaaagccatgcgggagaaagagaacagtaacagaaaaataaaaaaaatataaaatatataaaataagggttgaattttacccatggtttcggttaacataagagttagagtaatcctacataaaaattccaaatgaaaacagagcgaaggaccagcgatgaatataaaaatacagtttagaagcaatcattttcggaagtggctgagaagaatcggctgcagtctgttaatcggaagtatggtatgtacacagaccgttcccgcctgggcgacatccaaggcggaaaaagagaaaaaagaggcacagcagaagctggacgaggccaagaaaaaagcggaggcagcagaggctaacaagaacgccgtcagcgcacaggtatcgaagctgacctcagatttaacggctctgctcaccgatatccagttcctggagacggatatcgctgacaaggaagcggatatcaagcaggcggagatcgattatgatgccgccaaaaaagaagaagaaaagcagtatgccgccatgaagaagcggattcagtatatgtatgagaagggcgatacggagtatctcgatatctttttgcaggtaaagagcatgtcggaccttttaaacaaagcggagtatgtggaaagcatttattcctatgacaggaagatgctggatacgtatcaggagacgaagcagcaggtggccgactataaggcgcagctggagaatgacaaggctgagatggaggttatggagctggagctccaggggcagagatctcagctggagaccaccatcgccaataagaagaaggaagtcagcaattttgacgcccagttagcccaggcgaagaaggatgcggcggattatgccaagacggtagagaagaaaaaccaggagatccagaaggcgaaggaggaagaggccagaaagcagaaggcggccgaggaagccagaaagaaggcagaagcggaagcggcaaagaaaaaagcggcggccacgtctacttctaagaagacatcggccaacgataagtataccggtcctgccgcggtaaagagcagcggcggttcggcagaaggacgcgcggttgcggattacggtttgcagtttgttggaaatccctacgtatacggcgggacgagcttaaccaacggagctgactgttccggatttgtgcagcaggtatacaagcactttggctactcactgccgagaagctcttcggagcagcgttctgcgggacgcgaggtgtcttactcggaggcgcagccgggagatttgatctgctacgccggccacgttgcgatctatatcggaaacgggcagattgttcacgccagcacgccgtcgacaggaattaaagtcggtacggctacatacaggacgattttatcagtcagaagaattgtataggctgaggatgcactgcgagggtcatccggtgcgggataaaatcgtataaagtgagattaatcatatgaaacagcagaatgactggtatacgggcatcaaccattatgacaattatgtggagaaggagatcgggatcgaacgccgaagcatcgacgggcctaccgaaccgtatctccatgagcgggtggagctcttctatgtgttgtcaggaaagggcaccatatcggtaaacgggtatgcctacgacgcggtgccgggcagtctgttctgcttgtattcccatcacttccaccatgtggaggcggtggaggagaagctcgatgtggcggtgatccggttccacatcgggctttttatgtatatgagctgggaacggcatccgaagcatgccaacgcccggctggtgtatgatacgaggcctgtggtacagctctccggggaagagagggaagaggtggaggcgctggtgaaaagtcttcttcgtgaggagaaggaggcacggtttgagcggctgaatatgattgagtacaagacgctggagctgcacgcttattactgccggtacgcctatgaggaaattgggaaaaggccgcgaaaggagcggaccgtgtggagtatgattgagaaagtgatactcgccacgggagaggatattacgctggaggatatgacggaggaggaagggatcagtccagaaacgctgaaccggagaatgaaggaggcatgtggatttaccttttttcagctcaaacagttcggtaaggtgatcaatgcctgcgcactgctgcatttcccggaattgtccatggaatatatcagtgaccagctgaatttttcttctgccgccgcattttacaaggtatttaagcagtactgcgggatgactcctcgggagtatcaggcgaaaagcatcgggattatgccgccggggagcggggccggtccggcgatgcagttcctgcagtatattcatattcatttttccgaggatatcaccctcctggatttgtgtgagaagttctgtatgaagccatatacggtgaaacagatttttaaacaggtgtttgggaatccgttcgaagagctcctggctcaggttcgtgtctcttacgcctgctcctttttgcggacgggggacaggacggttctggaaatagcatctctctgcggatttaattcccattccacatttctgcggcattttaagcgctggatgaaccagacgccggaggaataccgggaaataatgagggagagaggcgccggaacatgaggcctgcgcggcttgacaaaaaatgataataaaacttcataatgtgaatatatagggaagcccttctttgctataatggatgtatcacgttcaatatgcgaaggaggttttttctatgtatgacagattattttctccggttacgatcagaggcctggaactgaaaaacagggtggttctgccagccatgggtactcgtatggcaggggaaaagggagaaattacaccgagactcgttgcttaccacgcagccagggcggccggaggctgcggcttaaacattgtggaggtagctgcggtacatacgcccagtgcaccggcacactttgtgtccatcagtgatgacagcctgattgaggggcataagaagctgacggatgccatccaccaaaacggcggaaaagcagcgatccagttgtggcagggatccattgccaccacatttgaccccagagcagagatgctggtggtcaacgatatggaatttgccggaaagaagttgacggctataacaccggaaggaatccgggagatcgtggagtgctataaacatgcggcggcgcgttgtgtggaggcgggatacgactgcattgaattccactgcgctcataactatctgcctcattcctttttaagcggaggccttaatcacaggacggacgagtatggaggaagctttgagaaacggtcgagatttccgctggagtgcatcagggcgatccgcagcgccatccccggggatatgccgctgttcatgcgcatcgacgctcacgatgattatcttcccggcggcctgaccatcgaggaagttatcgaattctgctgtattgcaggagaaaatggagtggacgttctggacgtgtccaggggaaatatcatcacagccggttcggtatatgaggttccgcccattgatattccgaggggcttcaatgtggagaatgccgcgagaatcagaagagaaacgaagatggtgaccattgccgtaggccggatcaatacggcggagcaggccgaagaaattctggaggcggataaggccgatctgattgtcatgggaagagcccagctggccgatccggagttttgcaacaaggcgaaggagggcagaacagaggatatcatccactgcgttggctgtaatcagggctgctatgatggattctgtgatttaaggaacaggccgtttatcacatgtctgagaaatccgtgcctggggcatgaggaggagtggaagcttacgaaggcggagacatcgaaacgggtttatatcgcaggcggaggaatggccggactggaggcggcctgggtgcttcatgagcgagggcaccagccggttatctttgaggcgggcgaccgtctgggaggtcagtttatcacggcgggccaggctccgggaaaagcggagatgaagcaggcagccgtctcctttgggcggctggtggaacggtccggtgtggaggttcgctgccatacgccgctcaccgcagagcttattcaggaagaaaaaccggatgccgtgattgcggccatcggatcggctcctgttgcgcttaagcttccggggagtgaaaagaaaatggtctgtcaggccaacgcagttctggagcatgaaatagagccggaaggagacgtatgcgtgatcggaggcggtttggtggggcttgagaccgcagatgcgctggcagcagccggacacgctgtgaaggtgctggaaatgaaggagaaagcgggggaagatttaggcatgctccggaagattgccgtgatgcagaagcttggcggtgaaggcgtggagataatcacaagcgccttatgtctcgaaattgatgagagcggagtcgtagtcgatacaccggagggaaaacggactgtggcctgtgacagtgtagttctggctgtgggatccgtctccagggacagcagtgcattgagagaagcctgtgagagcgccggaattgagtttactgtcattggcgatgcgaaacaggcaaggcgggcgatcgatgcggtggcggaaggtttcgaggctgcgagaagcctgtaggcagagaatgcggagcttgttttgccgcaaatagagcgttcaacagaagaggaggaatgatccatgaaatccagattactggaagaactgaagatagggtccatgactgttaaaaatgccgtttttatggcgcccatgtctctcggatacgagagtccggacgggacggtcaatgagacgatgcaggaatactggctggcaagagccagaggcggcgttggctgtatcattaccgacgcgctttctgtcgacccggatgtgccgtatctgggaaatactctgtgctttagaaatgaagagagcattgcatcctaccgccgttttacagacagaatccatgagtacgggacaaaaataattccgcagatcacccatccggggccggagagcgtcagtgcattccgggggatacctcctgtggccagcagtgtttacttaaattccatggctcagaggacaagggctgtaacgctggaggaaatacccggaatcatacagaaatacgcaaaaggcgcatacgatgccaggcgtgccggttttgacgggattgaactgcactgtgcgcacgcctatatgctattgggatcatttttatcgcccatgagaaacaaacggacggaccgttacggcggaagcctggataaccgggcccgcctgctgtgcgaggttctcgatgcgatccgggaggcctgcggccctgattttcctgttattctgcgaatgtcgggaagcgagcgggatgaacagggcaatacactggaagacatgaagtatctcgtccctgttttggaacgccacggagtggctgcgtttgaaatcagcggaggaacccagtatgagcggtgcaataagattattccgtgtcacggagaggtgcagggcgtcaatgttctggaggcagaagcgcttcatgaggctgcgtcagtcccggttattgtggtgggtaaaattaatgaaccgcgctttgccgggtatctcgttgattcggggaaggtggacggtgtagtgctggggcgtgccctgattgcggatcccgactttgtaaataagatggaagccggagattacgaaggaattgcaccgtgtgcggcctgtgccatcggctgtgtaggggaacagacaaaacgtcacccggcctcctgtgtgatcaatccggcggcaggaagagaaaaagaactggagcttacagcggcggagcagccgaaacgagtggtgatcgtgggcggcggaatcggcggaatggcctgcgccagggcatttgcggtacgcggccatgaggtggtacttctggagcgggaaatggagctgggaggccagatgcggcttgcctgcattccaccccataagcaggaactgagcaagtggatcgtctatctggagcatgaactggaacggctgtccgtagacgtccggctgaatacggcagccgacagggctgtcatagacggccttgctcccgaggtgctgattctggctaccggcgccaaagagatgctcccgccggtgccgggaatcgatccggaacaggccgtgacggcctggcaggtgctgagtggggagacggtaatccccggaggaaatgttctggtggtcggaggcggtatggtagggtgtgagatctgtgaatatctgatgcatcagaaacgtggaagccttcatattaccatgattgagatggcggatgaaatcggagcgggcatggtggtgaataatcgggtgccgactatgatacggctgaaccggccggagattaccatgatgaccggaacgaagctgatgtccgtaaacggcagtgatgtgaccgtggaaaggcatggcgtgcaggagacgtttggcggatttacccatgtgatctatgcatgcggtgcacgtccggccagagcgctttttgatgaactgaaagaggcttatccggaggctgttttaatcggtgacgcctcacagcccgctcaggcactggaggcggtgaggcaggctgtggagactgcggtccggctcggataatcggtgaaaaaccattgaatcacaggtgcttctgatggtataatggaagcataaaaggaggacgtgcctatgaaacgatggttggatactgcagacgaatatataacgacctggaagatccgtgatgtggcactgctgaagctttgtgtctgtgcggccggctttctgttgggaatggaaattccccggcggcaccggaataaggcggcaatagcagccagtgtagttttttcggtaacgtacgtgatgattatgctcccatttttaaagcggctggaaagaaacgggaaggcggaagaggtttaaaaaggggtggtcagaaagggacggtcggaaaggaattggaaacaggggggttgtgctgcccggcgatgccgggcagcatttcatatcatggaaacgtgtctctgtgaaatactttttaactgttttacgtattaaattatgaaaccgggaggattaaccatgaagtggctgggaacaatctcgcttctcttttttgccgtgatagcgatcagtattggatatatgaattacagtcggatgtcggaaaagtggcagaactgtacagcagatacagagggaattatagtggattttgattcggaaatatctatgtccagcagcgataaaattctatatccggttgtcaggtattttgtaaacgggaagggatatcagattacctccggcagcgggaccaacagacagaagctgaaggtgggagatactgtcgtggtccgctataatccggataaaccaaaacagatgctgatcgttggatataatacgaaatcaacaatctatctgtgcatggcagtgatggctatgggcgtggttgtcccttttttctcaatgatattgatctggaaaaaacagtgattttttgatatgggaaggaaacgtatgaaactgtaacgcagcccccttaatattacagggaaatccaaaaaatacttgcggaattcgacattctgtgagagaatatagctaagtatgatgtgatatatttaacaaagtacttttcacaattattacttattcgaaaggagttttaacatgatttattcacaggaagtagaagagatgtgcacagtggcacagggcgttcatcacggcgctgctccaatcccagaagaagcaaaatgggtaaaatctaaagaagttaaagatatctccggtttaacacatggcgttggctggtgtgctcctcagcagggtgcatgtaagctgactttaaatgttaaagaaggcatcattcaggaagcactggtagagaccatcggatgttccggtatgactcactccgctgctatggctgctgagattctgccaggtttaaccgttttagaagcgttaaatacagaccttgtctgtgacgcaatcaatacagcaatgagagaattattcttacagatcgcatacggcagaacccagagtgcattctcagaagagggacttcctgtcggtgccggactggaagacttaggaaagggacttcgctctcaggttggtaccatgtacggaaccttaaagaaaggtcctcgttaccttgaaatggctgaaggttatgtaaccggtattgcactggatgcggacgatcagatcatcggctatcagtttgtaagccttggaaagatgacagatttcatcaagaagggcgacgatccgaatactgcatgggagaaagcaaagggacagtacggccgtgttgctgacgctgttaagattatcgacccaagacatgaataatgggacaggccggagtcatacatattcgttccggttttccatctgcagaatttgacatagccaaataacaaggaggacaagataatggctttatttgaatcatatgagagacgtatcaaacagatcaatgaagtattaaacagctacggaattgcttctattgaagaagctgagaagatcacaaaagatgctggtttagatgtatataagcaggtagaatccatccagccaatctgcttcgagaatgcgaagtgggcctatactgttggcgcagccatcgcaatcaagaagggatgccgtaaggcagcagatgcagcagcagcaatcggtgaaggacttcagtccttctgtatcccgggttccgttgctgatcagcgtaaggttggtttaggccatggaaacttaggcaagatgttactggaagaagcgaccgactgcttctgcttcttagcaggacacgagtccttcgcagcagcagagggcgcgatcggtatcgcagagaaggccaacaaggttcgtcagaaaccattaagagttatcttaaacggtttgggaaaagatgccgctcaggttatctccagaatcaacggctttacttatgtagagactgagatggattactacacaggcgaagtaaaagaactgtggagaaagtcctactctgaaggcttaagagcaaaagttaactgctacggttccaatgacgtaacagaaggcgttgcaatcatgtggaaggaaggcgttgacgtttccattaccggtaactccaccaacccgaccagattccagcatccggttgcaggtacctataagaaggaatgtaatgagaagggcaagaagtacttctccgtagcttccggcggcggtacaggacgtacacttcacccggacaacatggcagcaggtcctgcttcctacggtatgacagatactatgggacgtatgcactctgacgcacagttcgcaggttcttcctccgttccggctcacgtagagatgatgggtctgatcggtgcaggcaataacccgatggttggtatgacggttgcggttgcggttagcatcgaagaagctgctaaggctgggaagttctaaataattgcatatatagtattttaataccgcactagccattcatggttagtgcggtgtttgatacaggggatttctttaattttcacagttggtgaaactttttaaattctgtgctatactattacaaagaagacaactgaataattttatatagcggaaattacaataagtgttggtatatattatttaattaggggggaaaagatgagtgttagattagttaaatattcttatagattcgcagaacaagtattcaatggtagactgaatttaaaaactgaaatggaagaagttattttagaagcctgtaaagatctaacaatattgagcagacctaatttaaataaaatacttgatgaattatttgttgctaaaggctggcaacgtcaggctcctgtattttcaagtgaagaagctgcgtatgcaaaaatggattttttaaaggatagaattggtgttgaagtacaatttgggcatgcctcatttattggaattgatttattgaaaatgcagattgcttcatattcaaatttagacaatatagattttggtgtatatatagttacaactaataaaatgcaaaaatacttaaaaagtaattataggttaaagtgggacggaagtttatcttatgaaaaagtaattaagtatttaccacatataaaaagtgcaattcaagtacctatttacgttattggaattgatatctaaaatgaattctatatagctgtgaacttctatcagtaatgcacaattgcacactcatagtgcacaaacaccccacccctggtaaaccagcctttcatcgtttcaattgaggaagcggcgaagactgggaagttctaagcaaagtcagataaagcagataacaaactattgatatttttacttttggcataggatagtgttaacagagaaatgaaactatgtgtattgcggcaaaaagagttcccccagaaagcggtatttttctgagggattttttataaggtgaaataacccagcctgacggttgttcctatttttagctcaaatatttttgtgtaacaggatcatgctttttagatacaaaaaaacctccctgatattcaggaaggttttcatgacctatccgggaatcgaacccgggtttccgccgtgagagggcggcgtcttagccgcttgaccaataggccgtatctgtcatttctgacagcttcctaataataccataggaagttgaatttgtccagataaatttgaaaaaaaattaaaaaaattttcgacctctgttttcactaaagattaaactgcaaaagcaatgagaaaataccccataaattaggttgagccggcaaggtgacattccgtcaaccccgccgacttagtggaaacatatgtaggaagcgctctgactgcttaattcgatttcctatgtttataatattatcatactggaaaaatgtaacataaatttgaccgcagcgtaaaaagattatgaaatttattaaggctttctaacgaattatgaagtttgttctttttttgcataaaacaggaggcagtggcttgaaagctgtaaaaaacattataaaaaagtattgactatcacgtatggtgatagtgtaaagtgataatcagagatgaggtcatcgattcttttcgtgccggcagagggaaacgcagactaaactcaacagggaaggaaggtgagaatgatgatgactgtcaaacaggtttccgtattaacgggggtcagtgttcggacactccagttttatgatgagatcggattattgaaaccgacgcagatgacggaatccggatacagactgtatgatgaaagtgcactggaagtactgcagcagattctgttttttaaggaactggattttacactgaaggaaatcaaagtgattatggaaaatccgcaatttgataagaaggcagcatttgaaaagcagaaggagttaatccggctgaaacgagaccgattgaatggtcttttggagttactcgataaattaattcatggagaaacgtgtatggactttaaaaagtttgatatgagcgaatattttcaggctttaggtgaatttaaagcgacgcatacggcggagattatcaggcggctcggaagtatggagcagtttgatgaattatttggtgatcttcagtcgcaagaggtagagattgcagaggcagcggtcagacagtatggcagtattgagaattttacaaaagcaatgaaggaaaattttcaaaactatctctccgaggggccggttatctcagaaaatgaagtagatggaattatggaaaaaacggaactgctgacgaaacggcttacagcagatttaaccagagatccctcatctgcggaagtacaggcagccgtaagcgaactgattgctttttgtgaagaaagtaatagaggaatcgacatgggagaaaattactggttacttacggcagaggcttatcagtccaatcccgtgtatctggaagtgaacgatcgaaaatatggagaaggcgcatcaaaattcatcggaagtgcaattaaagagtatttagacaggaaatagagttgatgagccttaaaacagagtgaatgttagtcccaatgccatcttcgcagaagctttcaacctgcggaggtggcatttgctgcgtatttattgttcacggccaacgctgcgtatttgcggcagaaaacaactttccttgcaagataggaaaaattatcatttcatgttataattttttgtaaatgcatacagactgctgtaatcaggagcggcaaagtatggagatagaatttgccattactgcggtttcatcatagaagaaagagaggcgcaggcgaagctctgacgaatctggacagattcacgggagtactaaagaaatagagcctcagaagtaactgcataagcaggaagagaaatacagaaaaaggagaagtaacatggttgatttaaggattctggaagaactgtccaatgcatttggacccagtggttttgaagaagatgtggtcagggtagtaaaaaaatattgcggcgggctggctgtgagaaaggattcgatgcacaatgtatacacagagatgacgccatcgcctctgactgctgtaagccggggaaattgtgggatttacaggaatgatgagataccatcggacagacgtcctgtgttgatgttggatgcccatctcgatgaatgcggatttatgatccagtccattatggaaaatggtcttatgagcattgtaacacttggcggcttccatcttaccagtctcccggcccactcggtgatcgtgagaacggaagaggggaaactgcacagagggattactacttcgaaacccgttcacttcctgacaccggagcagaaggcggataacagtctgaagattgaagacatactgattgatgtgggagcatgcagcagggaagaggtactgactgtatatggaattcgtccgggtgatcctgttgttccggatgtgacgtatgagtatcatgaagaaaatggtatctgttttggaaaagcttttgataaccggctgggatgtttttgtattatcgagaccatgaaggcacttatggcagaggaagaaagactggcagccagagtcgtgggggcgtttgccgcgcaggaagaggtgggaaccagaggggccacagtgactgctcagcaggtgaagcccgatcttgcgattgtgtttgaggggtcacccgccgatgatccttatgttcagctggggacagcacagggagtaatgaggggcggtgttcagatccgtcatctggacaacagctacatctccaatcctgaattcatcaggtatgcccatgagacagggaaaaaattcggaattccataccaggatgccgttcgaagaggcggcagtacaaacgcaggtaagattagcctgaccggccaggctgttccggttcttgtgctggggattccgtcccgatatgtgcacagccattataatttctgcgcaaaatcagatattgaagcggctgtgtccatggcggtggaggtgatccgaggactgaatgcggaaactgtgaagcggattttcaggcaggatctggtctgaccgaaaggtggggcgagcgtatccgggcaggcgaaatgtacgctgtgagcggagaaacctgtgtcaaacgattggattttgtgtcaaagaaacgggattttgggcagtgggagtcgtttatttttcacagcttttcatgagggtgtgagaaaatacttgtcaatgcttttctgatagaatataatatcaaggaaagagctgttgcagaaatcgcttaagatgcatgcaacagcctttcatcttcatttgcaatttttgttttttattgaaggaatgcgggaatgctaaagagaaagcggcttatgtccgtttttttcatttccggcattcgtgatactgtacatgattataataggaggaatacccgtggaaagagaaatgattattgttctggatttcggtggtcagtataaccagctgattgccagacgagtcagagaatgcaatgtttactgtgaggttcatccatacacactgggactggataagatcagggaaatgaatccgaagggaatcatttttaccggaggtcccaacagtgtatataaggaggattccccgcattgtgaaaaagaaatctttgagatgggaattccgatccttggaatctgctatggttctcagttgatggcttatatgctggggggaagcgttgcgacggctcctgtcagcgagtatggaaagacggaagtggatgcagaggcggacagccggattctcgattccgtgagcccaaaaacgatctgctggatgagccataccgattatatagaaaaagctccggaaggcttcagggtaactgctcacacaccggtctgcccggtggcaggcatggaatgcgaggagcgcggcctctatgcggttcagttccatccggaggttatgcatacacaggaaggcatgaagatgctgtccaattttgtatacaatgtctgtaaatgttcaggagactggaagatggattccttcgtggagtcttccatcaaatcaatccgcgaaaaagtcggcagcggaaaggtactctgtgctctgtccggcggtgtggactcttctgtagcagccgttatgctggcgaaagcggttggaaaacagctgacctgcgtatttgtggatcacggtcttcttcgcaaggatgaaggcgatgaggtggaggctgtttttggccccaatggtccttatgatttgaactttatccgtgtcaatgcccaggagcgtttctatgagaaactgaagggggctgaggagccggagcagaagcgcaagatcattggtgaagagtttatccgtgtttttgaagacgaggcaaaaaagatcggtgccgtggattatttcgtacaggggaccatatacccggatgtgattgaatccggtcttggaaagtcggctgtgatcaagtctcaccataacgtgggcggacttccggagcatgtggatttcaaggagatcatcgagccgctgcgccttttgtttaaggatgaggtaagaaaggccggtctggagcttggaattccggagtatttagtttaccgccagccgttcccgggcccgggcctgggcgtgcgcatcatcggtgagatcacaccggataaggtgagaatcgtgcaggaagccgatgcgatctaccgtgaggagattgcaaaagccggagtcgataagggacttggccagtactttgcagcgctgacgaatatgcggtcggttggatgtatgggtgacgagaggacatatgattatgcggttgcactgagagctgtgcttacatctgattttatgactgcggagtcggcagaacttccgtgggaagtcctgggaactgtgaccaggaggattgttaatgaggtgaagggcgtgaaccgggtgttgtatgattgtacggggaagccgccggctacgattgaatttgagtaaatagataaatcgctataaagctagagtttatcagctttgtagcgatttttattttgtgaataagtacgatttgggtacagatatttattttctggtattatgtttgaaaaacttatgtatttggtaaaggaactggtgggcagatacgctaaagagaatcaggcatccggccatgttatggaaaagctgggatttcagtactgcagagaaatcccttaagaggcgaacgaggggaaacaccgttacgatggggcagagtgcaggcttaagttctgacatgaaaaggtatagatgacatgagaggcggtgaataaccgcctcattgcctcacccgttatggccgcagacacaacgatacatctcagacagctgtttcgaatactgctccatcagcatcgataaccggggttctccttccatcgtccgtttatagagaatctccggagttacggtacggttcctgtcggctttcatatgaagcatttcctggatttcgcttaaaatacaggcggtaaaggccagataatcttccatctgtgcggaattaaccgtacgggtctttctgttgttaatcaagaaaagcatttgttctgcctcggatatcatgtgccaggaaatccagagaagttttttgataaaggccgaatcctcgcttccggcttttttcagatactggataatctggtcgtgaatcagatggtaatggatctgaacatcgcagatgacaccataatccagaggggcggccaggctgctctccaacagtcgaaggtaaacgtggtgtatgtgaaacagctgatacaggttatagcggaactgtcctttctgatgtgtaggaaatacaaaacggtttacgagaagtacgagtaccatcgcagagacaacataaaggatacggagttcagcggccagcatctgtgggagtgccagtgtggtaagagtcagggcaaagcaggtggagaacagggcctgctgccaggttccggccgtctccatatagagtcccaccgccataaaggttgccagcaaaaaatgccagcctgttccatgaaacagcgggagaagaagctgcaggatcaggcagcctgccagtgttccgataaaacgggtttttatccgggtggcactttcctcatacataggacggagcagcaggaaggcattcagcacaagccagtagccgtggtttgcctggctgatcatgctgtaagcgaagccaatcgtcagaactgcgctgagacgaagcgcgaaacgagtctcaaatgtatccgcctttatctggccaaacagtttcttaagcgggcggcgatagctgggaagcttccaaccgtgagaactctgttttccgccatcctgccgaatattatccagaatcagcaggaagaggcggagaaaattctgaatgaatatacagggaatttcatcgcactcctcaacctcggccagaagctcgctgcctgttcgaaccagttcctcctgctcaaatccatcggttccggcagtctccatatactgggccaggcgttccaacaggtcatgccggttcggatctgagagcatggaggcctggtatgggttcgtcagaaaatacactgcccgctgaaacagcagtgcaaacatatattggattttccctcgggggctcacgacataggtgagcccccggcttttgtatgcttctccgtaaagcccctgcaggatcggaaaaatgggttccgcctgtccggaggcaggactgtcagacggttttccctgttctgtggcatgggccttcggctctatttgagcacgaagcgcgtccgccagaagcagaagtcccctttttgcaggggaaaaatgatcattctttttattccgtaaggaacagaagaacaggacaatggtcaaaacggccaggccataagccagagccgccatctgcagagccagcccctcccggccaacaggccgcagctggagaaagacaaagcacatggcatttgcaaaatatcccagctgattaaactgtgaggtctgaagaaagaccagcagaaatgggacaatcagattgagaagtatacagagaggaaggcttaaggacgcaaaaaagctgagaagagccatcaaaaactgtgttcccaccagaaccatcagctgcctgactgtgaaagatttccgataatttaccttaaacaggattgtaaccaccgatacgaggattgaataagaaatgccgaataaaagaatcgtagagtaaaataaaaaaaggaaaaaaagaataattggcagggccgccataaatttggagcggagagctgccaatatggattttgttttggttttcatgaatgaagtcatctcctttaaaaaagtattataactctaatggggacggctgtcatcttttttgtgaagagatcgaatttgcctattgtaaagagattcaatctgtttccggtacagacgtataagatgccgcaaaacagacgtaatcagacaaacggattatcgttcctttggcagcatcttatgttttagtctgcgggagtgtccattgttttctcccgatattgcaccggtgtaacgcccatataatttttaaaaacagtcaaaaaataattataactttgaaatcctgatttttctgctatttttttcagggaatcgttggactgaaggagcagatgcgaggcgattctgactctgtaagtgtttagatatttcgtaaagggaagccccatagcatctttgaagactctggaaaagtagacctcagacaccccacagtgccggctgatatctgacagggagatatcaagatggtaattttggcggatgtaaatcaatgctttctgtattaatggcggatattgaaagacggaggtggaaataagctgttccagaccctgatggtaatagaggagaaactgtttttttaatgcgtcaatatccaggatattatggatggccggcggctgcaccgcgatagcctcatggtccggtgtggccgtccgcagcgccagctgcatgatttcggtcagacggagtacaagacgctgaagttccagaagagaaacgtgtgtctgctgtacagattcaaaaatatgggtgacaatttctgtcacacgtttttcattcagatgaagaagggattccgacaactcattttcttcctgcagggagagcagcaggggagaattttcttctttttcttctgataggtcagaatcgctgttaaacggctttacctgaagccggtggtgaattttcaggtagtatggccgtaaatgctccaccgtatcgaagactggcatggtttctgcaaaggtatggatggaaagataacgccgcaggttgttttttaaaaggctgatatcctgagccgcagtctgaagaatggctgcttcactggtgagatcaggaaaggacaataaaaccagaaattctccgtaattgatatgagtgataattcccctttgaagcgaagtaaaaaaagtatcgcaaaagtggagaacagtatttaccaccttttgatggcgttcatccggaatactctgatagatactggagaaattggtgatttgcagacatgctgcaacgtgccgtctgccatttagcaaaggatcggaagcaaaaaaatggcggctctcctccgggatttcataattcaagaccagattccgaagatactgctgttttgacagctgacacatctggttccagtgtctctgatgaagctgctgtttatcgatatggtgctgtatttctgacaattttgtttcaagcagagaccgggacaactcatgttttaggaggtaatcataggctccggcctggagaattggttttacatactcaaaattatcgtaattgctgatgaccagtatcgtaattggaagctgatgtttccggatatatccggctacctctaatccactggctcccggcatttccatatccagaattataatgtctacagaattaccatgaagctttaagaattcgatggcactggtcccgtccagcagctgtccgcagacatggatgaagccgaggtctgccagaaatgtctgaagtttatttaacgaaagtatgtcatcatcgacaagaagtgtctgaagcatgtgagtcctcctttacaggatagcttaataaaatgcgtgtgaaggtctgtccatcgctggcaatggaaaacgtaaagcggcttccgtactggagacggaggcgttcgatacacgtccggataccgatgttggaataagtttcctctgtctgacaggacagagaaaggatctggtcaatctgatcttttctgattccggagccgttgtcttcaatgatgatatggagctgttcttcctccagatacgcatagagaaagattataccatccttttcgaaattgctgaaaccatgctttatgcagttctcaataaagggctgcagaagaagctttaaaacaggcagttccagcaggggatcggcaacatcacactgaagtgtaatatcctgaaaattattatatttttttatggaaatatagtccttgataaagccgatttcctgacgcagtgtaacgaagttttctgtgttcttggatacgagctttaacattctggtgaatgcgagagagacttcctcaatatttttcacgccctgaaggcttgcaagctgtgtaatcgtatttagtgcattataaatcatgtgtggattcagctgctgctgcagcgtctgcagttcaagccggcgctgtttttctgcgtttgactgaatttcctccagcatcttgtcgatttcattttccaaatacacgataccgtctgatatttccttcagctcgtcgttgtttttatgatgaaagacacttttctcccttgttgtaataaagcggagcagttcatttttaatcagaagaatctttctggaaagtgatttcgagatgattctggaacatgtaatggtctgcaggaaaacaagaatcaggataataacaaacaaaattctgatgtttccggaatctttataaatatatgtatgcggaaccagcacataagtgtggtaattcgataagagagagctggcatgcgccatctcataaggttctctttccagggtcacagttgttccctgggcagagaggagatgttccataatctcgggtttgctcagagagtggatggcattggtataaatcagctcgttatttgggtttgcaatgaatacctgataattttctccgtcataatcgcctaaaatcgaatgaaggagctccgggctgatatccacgaggataacggcaagtatttcgtcatcctccttcaggacgcggccgtaggtaagggctttctgactgtcagtactgtatagattccgttctgtacagtaagtaccgggagaggcctgtttaatgttctcacagagaggaccgtcgaagttttgaagacggttgacattggaaccattggtgtaaatacggtcatagcggtcgatgagtgtatacgagcaggcaacttcaccgtaatttgaaatggacttaagaaaattctcaatcagcatatgctttttatgtccctcgaccgttacttcatcgtaattatcctttagataactgcggatattttcattggaaaaaatatgtgtaatattctgttcaatgtccgttgtcagggaatccagggcctgattgatggttgagatcctgctgtatgtaaaggtgagttcctttgaacgcatggtacggaaccagaatggatacgttgtgagactgatgagcagaacaggaacaatcccattaattagtaagagcagaacgagccgggcattaaaatgcgatttaaagtaatgaaccagttttgggtatttttccaattgcggtgcctcctgatcaaaaatattcgaaattgaatatatacaaatgataccatccgaaaaaatgtctgacaatgaaagattaaaaatttgtagtaactggtaaaaaatacaaagttttctgcatggctggagtaagtataattagcacatgaacaagttcacagggcaggttcacagagcagaaaggaaaaagaattgtgaaaaacaggataagcaacaagataaacagggctgagaaaaagcgaagattcatgaaaaatttccgggcaacgaaaacactgtatctgtttgtggtccccggactggtgtattacgttttatttaaatactggcccatttacgggtcacagattgcgttccgggattactctccgtttttgggatttacgaaaagcccatgggtgggaatgcaaaactttgagagatttttccggtctccggatttcttcctgatacttaaaaatacactgctgatcaatgtaacaaacttaatacttggatttccgtttccaattatactggctgttttgctgaatcaggtcaggaataaaggatttaaaaaactggttcagaccgctacatacgcgccatactttatctctgttgttgttctggtcggtatgatgtataccatgctctctccatacagcggtgtggtgaatgcggtgattcgtttctttgggggagatcccatccatttcatggggaaacccggaatgtatgttatgatctacgtcttatcgggaatctggcagacgtgcgggtggtctgcgattgtctacatcgcggcactggcatcggtatcccctgatttacacgaatcggcaattgtcgatggtgccggaagattacagcgaatctggcatatcgatctgccggggatcatgccgacgattattaccatgctgattctgacagcgggacagctattaacaatcggttttgaaaaatcatatttgatgcagaattccatgaacctgggagtatcggaggtcatatcgacgtatacctacaagcgtggactggtggatggtgacttcagctacgcgtctgcggttgagatgatgcagtcggtagtgaattttgtgattctgatttccgttaacaggttcagtaaacggttcagcgatacatctttatggtagaatgggggatatgtgaatgaaagcgggaaaaaaagacagagtattcgaacttgtaacgacagtgctgctggcagttattttgatcattgcattataccccttgtatttcagtctgattgcctccatcagcagtccgcgggctgtttatcaggggcgggttttgtttctgccggcagatgttacgctggatggttacagaaagatatttgcggatcaatcgatatggaccgggtttggcaacggcctcctctatacgtttgtcggaaccctgttaaatgttgtgtttaccgttccgctcgcctatgcgctttccaggaaggagtttccattaggcggcgtgttcatgaaaataatggtctttaccatgtatttctacggaggcatcattccgctgtattttgtagtaaagcagatgggaatgctggacagcatatggtcgatcgtacttccgacgctgatcagtacttacaacatgattattgccagatcttactttatgggaagtattccggaagaactgaaggaagcagcgtttttagacggatgcggatacgtgggattctttttccgtgtggcgctgcctctgtcaaaatcgctgattgcggttatggtgcttttttatgcggcaaaacagtggaattcctattttgaacctatgatctatttgagttcagaaagccgttttccactgcagctggtgctccggaccattctgatcgacagccagaattcactggcttcggcggatgcgtctactgtggcagatatgcagcagctggtagacttactgaaatatggctgcgtagttgtatccagtattccaatgctggtattttatccctttgttcagaagcattttgtgaaaggtgtaatgctgggggctgtaaagggatgagtgtgcccggaaaagggcgataaatgaaaggagaagcagaatgaaaaaaaggagtttagcagtactgtgtacagccgctgcagtagcagcgggatgtgtggcatgcggaggggcagtacagcccaagggccaggacagcagtcaggccgttgcagaggaaaaaggaaaagagaaaatcaaggtaacatttattaaaaatgagtggcatggagatccgaatgacatggagatctataagattctggaggaaaagaccggcgtagaagtggaatggcaggtttattcggcggcgacatgggaagacaaaaagaatctgatcttatccagtggagatcttccggatgtcttttatatgaatgccgtcaatgtcaatgatgtgacaaaatatgctcctcagggaatgtttctggatttgacggattatattgaggagtactgtccgaatctcaaaaaagtatttgaggaaatgccggaatataagaatatctgtattaacccggacgatgggaaaatctacagcattgggcgtgcagtggagagagaagtcatgtatacctccggtctgctctacatcaataagaagtggctggatcagctgggacttccggttccggagactgtcgatgagtattatgaagcgttaaaggcattcaaagaaaatgatatgaatggcaatggagataagggagatgagattccatttgtcttccattacaattcttccgtaccggatactgcgtacagctatcatcagctgttcggttcctttggatatgtggacccggttttaaccgtgggttcccatttcattgaagatgagaacggcgagattgtctatacagcggaacaggaagagtacaaggaagcaatccagtattaccataagtttgtggaagagggattatgggattccgaaggatttactacaccggatacgtcagtgatgaatgccaagggaaataatgatcccgaaattgtaggttcttttatggcgtacgattccacatttgtcgttcctgaaaaatacaaagaagattatgtaattgtggagccgttagaaggtccgacaggaaagagaatctggcagaacagcgccaacagcaacggtaatgtcaatggaacccagtttgttctgactgcgtcggcaaagggaaaagaagaggctgttatgaaatggctggatgcccattttgaaccggagatttcggcacagctgtttttagggccgatcggtacgactctggagaagacggacagcggaatgctggattatattcctaccccggaagggatgtcttatagcgagttccgatacaagaatgctcctgtacacgttccctgtaagattgcttcggaggattgggggaaacttgtgcaggtaatggatgaagatatcaataagctgcagattgccaaagagcattacgctccgtatgccgggcagtcctcccttttcctgctgccaaataaggaagagagcaaatactttaccactacggcaaaggatatcgatgattatgtcaataaaatgcaggtgaaatggctgacagaaggcgggatcgaaacagaatgggatacttatttagaacagctgaataaactgggaatcgatcaatacaaggaaacggtaaagggaatacgggaaaggatgggaaagcagtagaagtggatcaggaaacgagaaaaagtaattttctaatatttatgacagaccagcagctgggaacgacccagcagagcggaggttcggcttatatgccgaatctggaacggctgaagcgccatggagtgacgtttcaggaggcgtattgcccctctccccactgctgtcccagccgcgccagtttcttttccggattgtatccctcggaacacggtatatggaataatattgatctggcagatgcattttcccatggcttaaatgaaggcatcaggctcttttcagaagatttaaaagaagcgggatatcagatgtatttcagcggaaaatggcatgtcagtgcagaagaaggtccgggagaccgtgggtttggtccgtggatctatccgccgcaggagggacggtataagcagtggaagaaaacccccttcatgggagactgggactggcttttggaggatgactatattacagaggtaaggggacgtggtgacggtgagatttccagagtcggatttcctccatatacccagtatggtgtaaaagaaaatccttttggtgatggtgacgtagtctcctgtgcagaggactggctggaaaaggtaagcgaagaggagcctttctgtatgtatgtcggtacactggggcctcacgatccatactttgttccggaagagtatctggatctctatccggatgaatcgatggaactgccggtgtcgtggactgaccggatgcttgacaaaccgaatctctacagaaggacgagggagcggttcgatcagcttgatgagactgaacagaaacgttctctgaagcattacctggctttctgctcttatgaggacgcattgtttggcagacttctggatgtgctggagcggagaaatcttctggaaaatacagtggttttgtatgtttcagatcatggagattatgccggtgcccatggattatggacgaaaggtcttccctgctttaaggaagcgtatcacatctgctctgttatggggtacggcggaataaaggcggagggtgctgtaattggccacagagtatcgcttttggactatgcgcctacatttttagatctggcaggtatcctgaaggcggacgttatagcaggaaggcagagattttctggatattccttaaaaccgtttctggaaggacgtattccggaaaactggcgcgaggaaacttacacacagagcaatggaaacgagtgttatgggatccagcggagtatttttactgacgaataccatcttgtttttaatggatttgattacgatgaactgtatgatctgaggaaagatccggactgtatgaaaaatgtgatagaggaacagcaatacgagacagttatttacgatctgtacaggaaattgtggagatttgcatatctgcatcgggacgctttgggagatccatatattacgactgcgctggccaggtatggccctgggataatcaggggagtgaaacgggaataagaaaaaacgaaaaggggatccgaacaaccgggagttgtgcggatcccctttttacatcctgatcctcccacacaattagttcacagaaaaatcaccaaatcccctccggcctttcagctttctttcagcttttcatgctagagtatatttgtaatttatttctgacatttacacagagacaaggaggcggaaccgatatggcgcaggaaatttttaaacgttatgaaaagaaatatctgctgacagaagaacagtatctcggtctgaagcgggtgcttgaggatcggatggaggccgatgcatatggagtacataccatttccaatatttactttgacactaaggattttgaactgatcagaacttccctggatgggcctgcatacaaagagaagcttcgactgcgtgcctatgggcaggttaacgagaagagtatggtatttctggaaatgaagaagaaatacagcggtgtggtatataaaaggcgagttccaatggaacttgcatcagctgtccgatatttgaatgacggaattcttccggagctggaaaatcagatattccgggaaatacagtatatgaagcaacggtatcgtttgaaaccggcggcgtacgtggcttatgaccgtgtggcgtgttcctgcaaagcggaccaagaactgcgggtaacctttgaccggaacatacgctgcagaaccgaaggattggatttacaggccggaacctatgggacttcactgcttgaggagggcagggttctgatggaagtgaaaataccgggagcgatgccggtctggatgagccgcggattttcggagcttggtatctatcccgtatcattttcaaagtatggacgttactacagggagtatctggtgaacgcggagaggctgggacgctgtggaagagatagagaaggagggcgtgactgtgcttaacactattttgacagaaacagtcagctccggaattacactgccgcagctgatcctttgcacattaacatcactgggaattggaattgtgctggcatttctccatacatataaaaatacgagttcaaaaaattttgtgatgacgttagcgatcctgcctgcggtggtgcaggcggtgattatgctggtaaacggtaatcttggaacaggtgttgctgtgatgggcgcatttgggctggtgcgtttccggtctgcgccgggcaacgccagggagatcggaagcgtatttctggccatggcaatcggcctggcgaccggtatgggatatctggggattgcggttcttctgcttcttataatcggagcagcaatcctgattttgaccgaaattccctttggcagccagtcattttcacagaaggagctgaaggtaaccataccggaaaatctggattatgccgggatttttgatgatttatttgaaaaatacacaaagagcgcagagcttatgaaggttcgtacgactaatatggggagtctttatgagctgtgctaccggatcgaattaaaaaaggaagaagaagagaaggcgatgctcgatgacattcggtgcagaaatggaaatctgacaattgtatgcggcaggatcgcggagaacagagaggaattgtaaaaaaggagagatagaatgaagcgaattttaagacacggtctgtttctggcggtggcaggaactataattatgacaggctgccagagccaaaacgaaggtcagacctccggttccatagtggcagaagaaaatgggagcaccggcagtacggaaaccgtgataatcggaaatggagattccgtcacagtgacaggaacgggagccgcggtggaccagcgtgtcgtgacaattacggcagcgggaacgtaccggctcagcggggaacttaccgacggccagattgcagtgaatgcaggcaaagaggatgaggtcagcctgattctcgatgggtttacaatatccaataccagttcgtccgctgtctatgggatcaaaagcggaagcatcacgattatcacagaagagggaaccgacaatgtcatatccgacggaaccgaataccagtatgaggaagaaggggaggatgaaccggatgcggctgtattcagcaaggatgatatcattctggagggcagcggtatgctgactgtcaccggcaattacggatgcggaatacgaagtaaggatcatctgactgtgaagtcgggaacgtacgtgattgacacagttcaggatgccgtgaagggaaaagattctgtgaaaatagaaggcggcacgttcaccttaaaagcaggtgaagacggaatccaggccagtaatgacgaggaggaggacaagggctatgtagaaatttccgatggaaccttttccatcacagcaggagccaagggaattaaggcggtgacgcgtctggagatatcaggaggaaccatcgacattgattcggaggatgacgcaatccattccaatggtgacgtgaacattaccggagggacttttacaattgccacgggagatgatggtattcacgcggataaccgggtggtaatcgacgatggaaccattatgatcatagagagttatgaaggaatcgaaggactgatggttgatatcaacggaggtgtcatcgatcttacgtcggaagacgacggattgaatgcagcgggcggaaatgacggttccggtaatctggagtttggaagggaaggccggccgggcggcatgagaggagaaaaaacggatggtgccggcggtgcttttggagcggcagaaggtgcttatatcaaaattacaggaggagagataaagatcagtgcatcaggcgacggtatcgattccaacggtgatttctatatggaagggggaactgtaatcgcagagggaccgacagacaatggaaacggaacgctggattacgatggaaccggaacgatcaccggaggtatctttatgggaacgggaagttcggggatggttcagtcgttttccgaagactctgcacaaaatgtgattgtggtgtatttcaccagtacaaaaacagccgggacagagtggaagcttacaagcggagacggaacggtggaacttacgggaaatccggctaaggagtactcttccctgatcgtaagctccccggatctgaaagaaggggagacgtatcagctgactgcgggagaagaatccatggagatcactgtatcagggaggatcacccagtccggtacgcggtccggcacaggcgatgccatgccgggaaaacgaggtgctgacggcggtggcggggaaagaaaaccgggagaaggacagcgtccgggaggacaaaagcccgaaggggagcctaagcccgaaggggaaccgcaaagggaaacagctccggatcagaaagaatgagtggtgaataggattccaattctccttttttatggtaaaatagccatagaaaaggaaaacaggaggtttgacagactttgaaaaataaaatctggctggatcaattgagagcagaagacagggataccgttttttccctgacttctgatccggaaatcgtaaaatatatgcgttttgggactcacaaggtgccggaggaggcggaagaactcatccggaattatacggaaaagggaaactacggctttttgatacggctgacggacagtggggaaccgataggagtagccgccatgaaacacgatgaggagaactgcctggagtattcggtttcgctgttcagttttcagagattctggaatcaagggtacaatactgccgcagtggaattattgaagacatttgcgcaggaacagggaatcaggagtctgaacgcttatgtggtggaagaaaatcacgggtcgagaaaagtgatggagaaatgcggatttcacagaacggacattcttcattttgacgatttcccttccggcctgtacgtttactctttgcaaattggatcaggagatgaaaaacaggagcaggcggctgccgaaacaccgtgactgttacaggacacggggatatgggagccgcagtatattggaattagtagtcagaaaggataacaccatgaaactgtttggaaagaaagctcagccgaaaaaggaagagccaaagatgcaggaagcagttctgaccctgtatgcctgcagaaaagacgtgaaaacggtgccggatcttgcctgccgcctgttttctgaagtgatggacaagattctttatacggatgaagatgaatttcacattcaatttaaggatggcaccggagttcagtttcatctggtcaccgatgcagaggaaacagaagtacagtcaaaggggatggccagtttcttttcccgggctcccctggagaatgaggcggtgaaggacgcagctctctgccagattcgcctgtttaactgcatcataggaatccggttcgaaattgatggggacagcaacaggacaaactacattgttaacaccatttatggcatggcaggagaactcagcgcttttgtgttgtatcccaatatgtacctgtatcactgggatggccgtctgctgctgtcgattgacggaaagagtgattttgaggagttttatccccaggcaagcaccacgattctggatcgggaggagaaagaaaaggaggccgacagagaacggaaaatgcgttccattgccattttaaaggagaaggggattccctatcttgagcatttgaaggcgtcggtgtttgaagcagaatgtataattccggacaaggaagtggtcgttcatcgccttgcctgtacttttgccgcttgtgtccaatctgaaatatataccagcggacagtttgaaaactgcgcagaaacagcagcggaagagatcgctcagctggagaagaactatcagatttcggaatggctgtcaacggaagaacgggactatcttgaaaatccggataaggatccggcgcttcataaccggtttggctggcggtatgagtgttgttcggtacttttgtgggcactgtccatgattgaactgaaggaaccgacagaaatctgcaatgcctctgagctcggtgcaatcatgtggaaccatacctttgacagtctgatggaagcatcggttcttcgcagccgggatgagattctcgacatgcaggatcttgtactgcggtatgactgggcctgtgtcgatgcgaggatccatcacagggaactcccgatgctgagcggtgatattatctacgagtggcattatgcactgaactggctggtgcaggccgatggaatcgcggactgggacagagtgataacgacgacataggggattagaaatcaaagagagaatatagaggtggccggcctctatattctctcctgttattatttgatcaaatcatcgatttctttcagcaaccgcccccacaggacatacctcctggcacaatccgcaccgcaggcaatgacttccgtcaatacgacagggaactcccggcgcaatgcatttttgcggacatgattccgtacactgtccgcagccgatacagtcatcggtgatgaaatagccgctcacttcctcctttgccccgccataggaaaaactttcccggctgatggggtagttaagcaggtcaaaccattccccgctgccttcataaatcagaaatgcgtcgagtatatagcggctgtttcccggataaacctcattcatgcccggattctggagaaatacctcatccacccactttttatctgcgaggcgcaggcgtccggtaaatttaagcgactggcaatccggacacatggcgctcagcgcgatctcaccggtagctgtcagctgtttataaaaaggctttcctttcgaggttacaatgtacataccgtcgtcattggcaatcatgatgttgatgatccggctctgcggatggcccccggcgtccacggtcgcagcggacgctatcttgacctggcgaaacatcgttacgtatttttttgctttttcgttcatgtaaaccacctcctggtaatccaagcttactccttttgtgaagaattgtaaatactgtggttacccggatcgatcaagtacttcataaaacgatctgttcatggataagtccagacctccgccggaaaatgagattaacagaattgccgccgtcatgtataatagtaggcagtgacgtctgatttcattttcaatgatggaggaagtgatggaacgacaggaacgggctgaatcgacggcagtatttttttcttaatcatgacatacagatgtcctgtatgtccgctataatgaagaaaaacagcagccaggaagagcgaaggagaacggtatgacagaatcgaataaaaaggtaatcctgaagagcaggatcgagcagatatgggacgtagtgacggatttaaacgattacagctggcgcagtgatctgcagaaaattgatatactggagcctggaaggaagtttgtggagtacacgaaggagggatatccgaccacctttgtgattacccggtttgagccgccgcaccggtatgagtttaccatggagaatggtaatatgacaggcacctgggcgggcgtgttccgccagacggaaaagggctgcgaggcgaattttacagagcgggtggacgtgaagaagtggtttatgaaaccctttgtcccaggctttttgaaaaaacagcaggaacagtattttcaggacttaaaggcggcactgggtgagtgagcacttgtggaaagaactgtcatgaataacaggaggtgtttatgaaaatcgaccgattaatcggaatcctgtctatccttttgcagcaggaaaaggtgactgcaccctatctggccgagaagtttgaagtatcccggagaaccatcaaccgggatatcgaagacatctgcaaagcgggcattccccttgtaacgacgcagggccccaatggggggatttccattatggaagggtaccggatcgacaggaccgtactgacttcgtcggagatgcagtctattctgaccggcctccgaagcctggacagcgtttccggcacgaacaagtaccagcagcttatggacaagctggctatgggaaattcgtccattctgacctcgaacagccatattctgattgatttatcctcgtggtataaatcatgccttgcaccgaagattgaactgattcaggcggcgatcgacgccagggaatacatcagctttgcgtatttcgggccttccggggagagccgaaggaagctggagccgtatctgctggtcttccagtggtcctcctggtatgtgtggggatactgtacggaacgtgaggattaccggctgttcaaattaaaccgtatgctggaactgaaagcgctggctgaacatttcgcggagcggaaggttccggcgtatgatatgtcgcctgacaaggcattcccgccgcggatttctgtcacagcagtctgtgaagcggatatgaagtggcggctgattgaagaaagcggactggagagctttcaggagcgggaagatggaaagctggtattccattcctgcttttccgaccggggaagcgtctttagctggctgctcagtatgggagatcgtgtagaactggtggaaccggaagaacttcgggaggaatttgctgcgatggcagaaaatatttgccgcatttaccggtaatgatgacatacagctgtcgtgattaaagtggtattctgggattgttaaggaaaagaccacaggagtggtggaaaagaggacaaccggatggattacgaaatcgtgacactgcctgagaagaaggcggcaggaatcactgcaagaacgaataaccacgctccggacatgggaagcgtgataggcgggctatgggaacgcttttatgccagggggatttatgccagtatccctgcagacaggagaggctgggttctggggatttattccaattacgagagtgatgagaacggcgattatgacatgacggcggcctgtgaggtgacagatactgccggaatcccggaacacttaagtctctgtacgatcccggcgggacgatatgcgaagttcgtggtaaagggcgacgtacagcaggccctggttcagttctggacagaactgtggagtctggatttgaagcgggcattccgggccgactttgaagagtatcacgggatagaaggaagagatgcggagattcatgtctatatcggcttgaaggagtagtggaggggaagttatgagtgtggatttcaaaagagttactttggataatattgaggaagaacatatctgctgtgccatatcggataaaaagggggagacgtgcgtggcctccaagaaggcatggctgaaggaacggatgaaagaggggcttgtgtttgaaaagctggatgtgcggggaaaggtatttattgagtaccttccggcggagtatgcctgggcgcccatcgatgcggatggatactattacatcgattgcctgtgggtatccgggcagtttaaagggcagggctacagcaaccggcttttggagcactgcatcgcagaagccagggcgaagggaaagaagggccttgtcgcactctcttccaaaaagaagatgccgtttctgtccgatggggcctatttgaaacataagggatttgtagaagccgataccgccgcgccatactatgaacttctggcacttccgtttgaagaggggacagccctgccgcgctttttagaatgtgcaaagaccggcgagattgatgaaaagggctgggtcctgtactatacggcccaatgtccccacacggccaagtacgttccgattctcacggaatacgccggaaaccagggaatacaaatcaaagcagtgaagctggaaacgcgggaagacgccaggcagtcgccgagtccgtttacaacgtatgccgtattctatgatgggaaatttgtgacgaatgagattttatcagagaagagctttgaaaaatacagaaaaaaagtggaataatcactttttccacacctatatcataccataaaaatcactttttttcaagacttgtaatggaagagtgaaaggcgtagaatcagtacttaccaaatacgggaggtaatgagatgcaggagaaatggtatgagctgatggaaacggtacaacggaagcaggagctggaaagagtgcttgcctgcaatgaaaagacagaggccttcggactgatgcttacggaggaggacgcagggaaactgatggtctgcaggcgtgattccttaaggacgcagatgcgggtcgaattcgggaaggggatcctgccggagatcattgatacattctgcgattcaccatatctgcagcaggaaaattatgccgatgtgattgcagagctgcaggaagtcttttatctctacaagaatgaatcagaggacaacttaacggatgaggaacttttggcatttatgaaagaacagtttgacggagtctgctgcggttcagtcgcctatctggaagaaacgtgtctggagcgttttgcaagagcagtccgcgccggataccgggattatgtggaggatggcggcagcggagaatacgggaagttctcggaagaagcacggtgggaccgggatctctttctggagacgctttttgacctgctcagttaggaggcggacatggactatacgatggaagaactgctgcctgttgtcggaaaactgacggaaaagtataccggtttttccagtacctcggtcacctatgagacggccagacagctgatggaagcggtgctctactgccttcgggaagcagaagctgaagcgcttaagacggggaaagacaatgttgccgcggcctcagacacagatttgtggctgctttaccagcagggatatgaggtggtcctggagaagacagccagagctaaaaaggtttacgaacagatcattgcgaatttccattcctttggaaaccgttgctacgaggatacgatcatcagggggatgccggaattttttgtccgctatgatgccagattccggccccaggatcatctgctcacgttggattatccgattctgaggccagtcggaaaacgaagcgggattgacgctgtctatttttatttatcctgtgttcttctggaacagagatttctgggcaggctgccggaaccgtacggaaaggcggtcctggaacattttcacggggattatgaggagctgattctgaacgtggcttctgtcatcctgcggaatctggtggttcacatgatgatggggaaaaagctttcagagaatgctgtgacagcagacgatatggagcggttttgcatctgtgtgaagaactgtgaccggcaaaagcttgaggaggctatcagccatcagctggaacagctgacaggagggccggaaggcgaccgagccctctattcctatctgtcctgtgacaggaaggattttgctgctgaactgaagaatgccgcggaatgtggatatatggatcgtatgatcgtatattagattcccgccgtaatctttttgagggaaagtaattttaccgcagaatcattcagaagtctgaaaccaggagaaggaggcggtttttatgaaaatgccggaagtgatcagcagccggatggttgctccatgtggaatgaactgcatggtatgttttacacactgcagttcaaagaagccatgcggcggctgtatgggaaccgatgagagcaagcccggacactgccgtacctgtttgagaaagaactgtgcagctgaaagaggcatatcctactgctatgaatgctgtgatttcccgtgcagaaggatccgggatctggacagaagctatcgaaaacgctatggagcaagtctcattggacagtcgctgtatatgaaggaaaacggaatagaccggtttctggaagaagagcagaagcggtatacatgtgcggtctgcggcggaataatctctctccacgaccggacatgcagtgaatgcgggcagagataaccgcaggaattcctgatcaatattatgatgataccgaccgtaaaaaagaagaatatatacataatacacaaaaaataattgaattattgataaaatggcgaatagactaaaaaacttttagcatatataattatttttgtgatttaatattggtgctattcattatgtatatcctgagaattggctcagagtttctaccaactaccgtaaagagttgactacatagtttatgtagttgactctttttttggtaatcaaacgctggttggtggaaaggagtgacaatagaaaaccttgaaagcatagactacaggatagcagcgcagacagtctgatcagtttattaaaggaagatggaggacatactattggaacgtaaaacaggagtcgcagacaggttttttgggatttcacagagtcattcaagcgttaaaacggaaatacttgcaggaatcacaactttcataacgatagcctatattcttattctgaacccccagattttatctgatccatatgttattatgggagaccctgccatggcaggtaagattgcaaatggtgtatttatcggaacctgtatcggagcgtttatcggtacggcactttgcgcgttatatgccagggttccttttgcgcaggcgccggggatgggattaaacgcattctttgcatacacggttgtgctgggaatgggatatacctatggacaggcgctcgttatcgtatttatatccggtatatttttcattgtaatcacagcaatcggcctgagagaggccattatcagatcaatcccggatgcagtcaagactgccattacacctgggatcggcctgtttatcacaatcatcggactgaagaatgccggaattattatatccaatccggctacacttgtaagcctggtggatttctccaaatggagaagcggcgcagatatggttttaattaacggcgctctggtggctttgattggcctgattatcatgggaattcttcatgccagaagagtgaagggatcgattctgcttggaattgtagcggcaaccctcataggcattccccttggaatcacacagctgtcgaatctcgatatgaatctcggtgtgaaattcagggattttgcagaagtttcctttctgaaaatggattttgcgggtctgtttgccggaacaaattttgtggaaacgctgtttacggtaaccatgctggttatcagcttttctctggtcaatatgtttgattcgattggaacgcttctcggagccgccaggcagtccgggatgattgataaaaacggcgaggtaatccggatgaaacaggcattgatgtcagatgcggtttcaacactggccggtgcgatggtagggacatcgacggttaccaccgtggtggaatccagcgcaggtattgcagaaggcggcagaacgggacttacaagccttgtaaccgcggtcatgtttctgggagccatcctctttgcaccgattgtcagcattgttccggcagcggcaaccgcgcctgcgctgatttttgtcggtattttaatgcttggaaacatacgggatgtggacttcagcgacatgagcaatgcgctgcctgcattctgtaccatcgtatttatgccatttacatattccattgccaatggtgttgcgtttggactgattacctattgcctgatgaatattatgacagggaaaagacgggaagtacgggcattaacctttatgatttctgttgtatttgtggtgaggtatgcgtttatgacgttaggataagaagaacagtacttaaaccatttagagctggtgtgagacgaaagtcaaaacaccagctcttttgctgcccctgttcccgtttcagcgctgcattttgtcacagatacttatggtccactttttctcttttggaaaaaacgtcccgtcaatctgaattgattgaaccgtcaccggatgttataaaaaaatagaaatcaaataaagagaaagacaggtgatttgcaatggcagcagatgcgaaaacgcaaaaaaaacagatgatgctgacggaaaatatccgcacgctgattccacgaatggctgtgcccaccatcatggcgcagctgattaccacgatctacaatctggtggatacgtattttgtaagtacgctggggacgaatgccacagcggcagtgggggtgaacagctccttagagaggatgattactttaattggctcattaatcggggccggagcctgcagttacatagcgagactcctcggagcaaaggacgatgagcatgctgataaggtactttccacgtcatttttcagcggcctcggcctcggaattatcttcatgtttattggaaaaatggtgatcggagacctggtattctggctgggagccacaaaggaatgcgcccagtattcaatccagtacgcaaattacgtgttgtatgcagcgccgtttatgataggcagtttcatcctgaatatgtgcttaagaagtgaggggagcgccacattttccatgatcggcatcggattcggcggaattttaaactgttttctggatccgctgttcatctatcattttggacttggcgtcgcgggagcttccatggctacggctctttccaaattcatcagcttttgtattcttctgtatccgtatatcagaaagaccagtgttgtgagtatttctgtcaaacgaatcaaattcctgatgaatgacgtgaaagaggtgctcgccatcggctccagctcgttcttccgctccgcactcagcgtcgtggcagcagtttcgatcaaccgggtagcgggaagctattccactgcggctctggcggcgctgtctgttgcaaaccgggtcatggatttcccgtttgccattatactgggattcggacagggatatcagccggttgtaggatttaactggggagcgaaagcgtggaaacgtgtccgggaaagctacgtattcagctgtgccgtcgctgtgcttggagcggttggaatcggtgcggtaatcttcgtgtttgcgaatcccatcgttcatgtgttcaacagccaggcggattccgaggtgctgcgattgggaatgctctgtatccggcttcagtgctgtgtgctggtatttcattctctcggctcactcgtcaatatgttctatgccggtatcgggcatgccaaatatgctctgattatgaatctggcgagacagggctactgcttcttcccggtactgtttattgctcctgttttcctgggaatcaacggtgtcgcagccacgcaggcgattgccgatttgctgagtgtgattgtcattgttcctcttggactcaaagcgcttaagcttattcgggaacaggaagaaaaacagccctgaaatttcttgtttggaaagaatcgggagagaaaacggaattgattggaagcaatgatctactttataataaaatcagcagataagaaggaggcacaatatgtttattgaggttggcaaagaggtttttgagacagaagacgaaagtgtgattaacatccgccagaaattattcccggaggaagaaaagatgccgctggcgaaatacttttataattatccgctgcatgctccgacgccggtggagatgcagattatcaatcagttaaatccgatgaatccggaagacgctattttgccggagaatttcatggaccttttgaagccgtacgggtatgataagattgaactgggatactgtatgtttcccgatggctccggatacgtggccacttaccgggtgcggccgccgcatatcagtggagagatggagcggtggtaccggaactggagaaatctaaaatcaaagagtatggtgcccggccatggaaatttaagatataagatctggaattatgcggatcattttgatcattactacgtaaactggcaggatggctccgatggaatccataccacggagagtctggatctgggcgggggtgaccgcatgtacgataccatacgccaccagtttgatttgaaggattttggtctgacagatgagaagatgaaggaattaaaggacgcgggctgccagctgacgggaaaaggttcttatgagacctttgacgagccgggaacgcatttgtgtttaagctattcgcgtccatgtcctttgggcggcatcgagaccagaagccgggaatggatcggatggagaccggtgaacggaaagctggtcagagatcccagtacgaaatgcagtgaagaatatttaaaaaaggtagtgatccacaccctggtggagtgggaacatctctacacatttcttccggatctgtacgcggagtatcatgaccagcctgcagatgccgattaaaatataaggggaacaaaagattatggggaagcagggggcacagcagactggattcggaatgagagataagataggctatctgtttggggattttggaaatgactttacgtttgtgctgtcatccgcatttctgttgaaattttatacggacgtcatgggggtgtccggttatattgtgggaattatgatgatgatcgcgcggcttttagatgcggtaaccgatatcacgatgggacagttggtggaccgttctccggtgaggcgggacggcaagttccggccatggatcaggagaatgagcggtccggtggctttctccagccttctgatgtatgcgagctggtttcagaatatggggatggcgtttaaggtggtctggatgtttgttacctatctgctgtggtgcagcatctgttacaccgggattgtaattccttacggctctctggcttccgccatcaccagcgatcccgtggagcgcacgcagctgtccaatttccgttcggtgggaggaactctcgccatgacggtttccagcgtggttctgccccttgcagtctattataccgatgaagccggccaccgggcgctgtccggggcaaagatgacaacggcggcgctgttctgctcggttggtgcactgatctgttatattctgtgctacagtctgacgacagagcgggtgaagctggggcagacaacggagaaattcgacgcgggaaaactgctccgcagtctggcacataaccggtgtctgcctggaatcgtgctcgtggtcctgatacgggaggttgccaatacagggcttcaggctatggcctcatatatctatccaaactattttgcaaatacagtcgcgcaatctcagagcggcgtcgtgggtactgttattacgctgataatggctgcgtttattgtgaagctggcagtcagattcggaaagaaggagataactgccgcaggctgcttcctggcatctggaattcttgcagttgcttactttgtacatactgaaaatgtatatgtctggattttcttttatgcggtggcaactgtggggcttgcggtatttggcctgatcggctgggcaatggtatcggatatcattgatgataccgaggtacggacgggagaacggggggatggaacgatctacggtatttacagcttcgccagaaaagcagggcaggcgtgctcctccggcgttaccgggattctgctgagtctcatcggttatacgccggacaccgcatttgacgcggcggtgacggaccggatctatgacatcacatgcctggctcccatgatcgggttctttgccatggcgctggccgtgatcttcctctatccgcttgataaaaagacggtgctggggaacgcggtgaagctggaagcagagagaggaaaataaacagaacaggagaataaactatgctgacattaaaaaacagaacaatgataatcacaggaggggccggaaacaatgggctggcaatcgtgcgtatggctcttgaatacggtatgaacgttgcttttatgagctccttccacggaaaagcccagggagctgttgcaaaaatggatccgagataccgggatcaggtcatcggctttgcacagaatcctcaggccaggcttgcggagaatattgcctgtgatccggaactttataaggaagataccacccaggaggatgtgctccggtggatctatgagcgttttggaagcattgacgtggtggtaaacggatccggcggccatgaccgccataatatggaggagacggataaagccatatggcgccattccatggaagtgcttgaggccgcatttttcaatacaaagctggcgcttccttatttattgaagagcagggctccgagagtcatcaatatgaccacctgtgagaagaacggaggctggtatcccaatccttcgtttgcagcatctcgcagcggaatgatcggcctgacccaggagatggcaaaagaactgggaccgaagggaattacggtgaactgtgttttgaccggccatattgagcaggatgttccggaagaagatatactgccggaggagcttaaggcggaactccttgcgagaacaccgttaggcaggctgggagttccggaggacatcgctggcgcggtcaattttctggcgagtgaggaagcgtcattcatcacaggagcagttattgatgtcaacggcggagcaatcatgggataaggaggaagtgttatgagcgattaccgattgccggagctgagtccggcagaaaagaggatgcctgccgcgcgttttattaccggttatcccctttgccccccgaatccgcttctgcagcagattttagacgcgggtcccatggaggtgaaggatgcgattccggcggagaactggctggatcttctgcagattcacggataccgcgatatcgtgtatggctataccatgatgccggatggctccggtttctatattgaatattctgtatcgccggtcacctggcagggaaaatggaggagatggtacgggacatggtataaccggtattcgaaaagcatggtacccggggaaggaaatttgagatacaaaatatggaatccactggatcactgggatcataagtttgtaaacggtgaaaatgacagagacggcgtgtggtctgtggaaactctggaccttggcgcgggaggcaacccgtcaaagggaatacccgccgtatcccactccattgatttgagagagtatggcctgtcagaggagcggtatcaggagcttctggcggcagactgccgggcagaggcctgctgggaagaatttgaaggtcccggccaccacctcgtcctccggttcagccgtccatgcccccttggcggaagggagagcattaactgcgaatggataggatattatgcgaaggacggcaggattctccgtgatgaggagactccggtggatgagacgtatcttaagaacgtgctgacgcataataccatcgaaagagcgcatttgtatcaggttttgccggatctgtatgaggcgtacaaagaccttccgatggatgcggattaatcattgccagagaaggagattggtatgggagagataaaaacgaccttcgtatatcttgccaaacgggttccgggagtgctgtataaaccgaaagcgggcagccccaaacagggcatcagcgtcctggtcatgcattcagatgaggattatctgacatttccaaccggcgcagaactggcagagcgcggatatacggttttatgtgccaacccggcgaataaagaaggaatcatcttcagccaggtggaaaagatgcagtgtgtcaaggctgcagttctttacctgcgcagtctgccagatgtcgaaaaggtggttcttatggggcacagcggaggcggaaccctgatgacggcttatcagaatattgcggaaaacggcgcggaggtattccagggacaggaaaagatcgttccctatccggacaacagtgaacttccgcctgccgatggcctcatgcttctggattccaactggggaaatgccgcgatgcagctgttcagcttagatcctgcggtggaatcagagaacagcggacggctgatcaatgaggaactgaatctctttaacccccagaatgggttccagcccgacggagcccattacgacagggaatttattgatcagtttcagcgggctcagagcgcgagaaacagctgtattcttgattatgccttaaaccgccttcttctgctgcagaacggccagggaaactactgcgacgacgagccgttaatcataccgggagccgcgcagggcttcttcaataataaactgtacgcgcaggatatccggctcatgtcccatacgagagagccgcaccttctgctgcacggagatggaacggcgacgaaggagatagtgtacagcgtgcgccgaccggaaaatccgcgttcctataccgattcattctgggagggagcccgtttcctttcggtgaagacgtacttaacctcctatgcggtacggacggaaaaagaattcggttacgatgaggaccacgtgtgggggattgaatgggattccacctataactgcactccgggcaatgtcgtagggataagagtcccccttcttgtcatgggaatgacaggcggatgggaatacttagcgtccgagacgatctaccagatggctacgagcaaagacaagacgatcgcgtttgtagagggcgcgactcacagattcactccggcgaaggactgtgaggcgtatgaagggcagtttggcgatacgatgaagactctgcatgattttgcagacgcctggttatcagcaccaggacggttttggaatggagaataatagaaaggaggccgctgtactggcctcctttctattactggttaacgtaagcgatgtaatatattatatttttcgatacgaagtgacttttttccaatttgcaggaaatcccataatgttaagtaagacgtcacgagaaatctgttggttgctggttaccgcttcttctatcaatttgctaagctgtgatttgtaccgtaagaattctgaatttggcagtaaataacggaatgccaggacaacagcaaagtagtctcgttttccacaaagataataattgccctgcacaggaatgctgagctttttatgcagtgggaaatcgggaatatcttttttggcacatcggtgagaaaacattcgttcattatgcgcacacaaatttcggtagtccgttaatacatctaaaacttgtcctaattgcttttcgttaacagcaggaaagttacggctgacagcatattggattttagaaactgataattcatacatttttgataatgtaccgaaggaaagagcatttaccattacccaaagggggacatttccgtgtacctttttgttatgctcaagaaatgggtatgatgtctgcttggtcagtagtggagagagatactttgtaatcaagcgattaatagcattgctttttttctttgtattgtcataatttgctggattcagatatgcactttgttgttctccaaattgatcacaaaatgcatagcttagggtagaacgaatatgccgttcaatatgtaaaagatggcgaagcgttagttcacgtaactgttcgtcaaactggtataacgcaagaatgtcctgcagggtggtaccatccctgtagttcttcgtggaaggatttttaaataaatccttgtaccctgtaattaaagcatagtagccatcatgccgtagtatggacttcgcttcttccacatccgttatcgtcagatttttatcgcggagtttttgtatttgttgttcataggtcatgaatggttttggcataagttacctccgtataaaagttaaaaggagcccccgcagggactcctccgatcgcaggcctcgcaagctactgcaatctattcactgaggtaagtatagcgtattttaaccaggctgtcaatggaaatcccataaactccttagtggtttcataacgctatacaatccagttctttatagtttatgtagaagcaatcaaaaaaattcttatgctcgaaggcttctctgcaagctctttcttgtttttactggcttatctgttcaatcatataatgcagaaaatccgcggcggaggccgaccggacctttctctggtagagcaagtagatgtaggaacggatcgtcggatagatatccacgatggagatattgggaatctcagccgggatgtgcagccggtttaagatcgcaacaccccgcccgttgctgacgtagcgcaccatggttgaggtaaactccgagtgggcaatcacatttgggataaagttttttgaatcacataaattcagaaatttctgggtttcttcatgcgtgcttcccacagagttggaatggagaatgaatttttctccgtacagctgctctaaggtcacgctctctttatcggcaagcggatgaccgcagggaaaaaccgcggctaaatggtccgtcttatagatcatcttgttaaaactctcatcctgcacgtcattttcagagacgaaggcaaaatcacacttcttggacttcaaaagagacatgggctgataactttcaatgatattcagattgtgttcaggatactttctcgagaaatcagcgatggtatctaccagaccgtactgtcccagcaccggcgcgtaggcgattgaaaaatggtccttatccttgtctgtcaaatctccaagtgtagcgatggcttcatgctgaagctgtacgatctgtttggcatacggataaaaggcatggctgtattcattcagcttgacgtttctggtagaacggtcaaacagagataaattcagttcctcctccagtttgtgaatgtgcttggtcagtgaagactgagacaggttcataattgcagcggtttcctgaaagctgcatgtttcgaccagagaaacgaattcttccagtacgcttatttccatatatttcctcccccataagaaatatttatcgtagttatacgatgacagtataccataatttacggtgaagttcaaatcctgccatatccgatattttccattctggaaagaacccggccgtgaagcgaattgatccgtgaagctctctaatggtatatatttggtatcagagatttggggctgataaaaatacagggtgtgaaaggagaagaatatgatgaaaaaaagctggatggctgctttgctgctgtcttctgcggttctggtgaccgcatgtggggccggtgcgccgcagaatggctcggggacggaaaacagcggtacggtgaagacagagggggcggttcctgatgcagaacaggaaacgacggaaactgaaacagagggaaaaacgacagagaaagcggcagagaaagcgcagtcaggcggaatctcgaaggtgattacgattaacaaaagctttggcgacggccagaaagtaacgcatgtggccttacagtatgaaaaagcgattgatgcggacagtctttccacagacagctatgaggtgaagaaccgtacggtcacggcggtgcggaccaacagtgaggccgctccggcggaggcgagtgtacctggaaattatgtgatactcgagctggagatccagagccctcttctcgacgataaatacgcgtcggacgggcgcatggaacacgatgaggtgattgacaccgcgaccgtcgtccagataaaggatgtgaagagcacagatggagaggtgtatccggccggcagccaggaatactcgactcctgccaatgagggaatcatggggaatgattctaaactatatccggtccgcgaccgattcgaagacaaccatttttatacagacccggaatggaagacggttcttcactacaatatttttaagccggagggttatgaggattccggggagacgtatccgttactcctctttatgcctgacgcgggatcggtaagctccgattgggagaaggttctggcccaggggaatggaggcaccgtatgggcggaagaagaatggcaggcggagcatccgtgctttgtggtgacgatgatttatgacgataaatttatcaacgattactgggaatattacgacaactatgtggaaggaaccatgaatctcgttcgctcactggcggatcagtatccggttgataaggacagaatttatacgacgggtcagtctatgggctgcatgtgttctctgatcatgatgtccaaagagccggatctctttgccggagcgtactgtgtggctggaaaatgggagccggagagcctgaagggactgaaggacagccatattctgatcctgaattcagaggatgacagcctggagacgggacttttgatggatgagacggtcagcctctgggagcgtgagggggcagccgtggcaagaggggcgatcgaagggatcgcagagccgcaggttcttgaagcggagatggataagctgctttctgaaaatgcagatatttattactgtaagattcaatcagggaccggaagcatggatctggagggcaatccgctgaacggaagccatcggatgacgtggcgtctgggatacgatcttccgggtgttaaggagtggctgttcactcagtcaaagtaatcttgcattttccaaattggaaaaaaagcagaaagaagtcgaattgattgagtgttcgtcattttatataataaagccatcaaaaataaaaaaaatttggagggagttacatgaaaacgaaaagagttttagcgctatttacggcatctatgatgaccgcggcactgcttgcaggatgcggtggttcttccggtaccagtcagacaacggcgccggctgcacaatcggcggaagctacggagaaagctgcagaagaaaacatacagagcggcaatgaaaaaacagaaacaaccgtcatggaagaggcggcagagtctgtaaccgtggcggttgacgatgattcgtttacgattggaccgtggggcggagccagcgccgtgcgtgactggacggaaaacattctgtgggcgcatctggcgtacagaccttttatcggagccatgctggatgacggagtccagcttgtggcggcaaaatctgtgacaaaaacggatgatgcgacttatgacattgagatctgggataatatcacagacagccagggcaatcccatcaaggcagaagacgtggtgtacagctataataaactggcagaacttggctacgtgacggatatcggcacttattacgctggatcagaagcgaccggcgactatacgcttcagataaaactgaaaaataccatggacggcgcgatcgagaaggttcttacctcctgttccatagcaagccggacctggtatgaaggggcctccgagaatgatatcaacctatctcctgcgattacaggtgcttacaccgtaaccgacatgcagactggctcctccgtgacaatggaggctcgcggcgactactggaagaaagaggacagagcggatgcggagctgcagaatgttaataagattattctccgctgcatcgccgaggcctcctcgagaagcatcgcgctggaaaacaaagaagttgacatggctgaggtttccgcttccgatgtcggacgtttcgaaggaaatgacgcattcaacgtgacgaagtataacaacgccatgtcccagtatctgattttcaatacgagtgagaattctccctgtgcggatgtgaatgtccgcaaggcgatcgcctatgcgtttgacgccgcgatggtgcttcagggcagcggaagcagtgcgggaaccataagccatgatgttgctccgaatctgggaccggattacgtgcaggagtgggataatcaggattactttggaatgaacctggaaaaatcggcagaatacttaaaagcggcaggctatgagccgggccagcttgagattcatttaatggtatcctcacaggcgccgcagggaccttatcaggcactgcaggcaatgctcgaacaggctggaattaagctggtgattgacgcttacgaccgcgcgttaaggcagacgtatgacagcgatccgacgatgtgggacatgtctgagctgtctcagtccgtgtctgattttacaacgtcattctggaatatcctgttcagcgaagataactatgagtacggaacccagggcttcacaaaggacgataagcttcaggaacttttgaaggcggccaatgcagaccggagcgaagagaatatgaatgcgttccatgattacgtgattgagaactgctatatggtgggcctgtatacagagacgagaagcatcgtaacgacagaaggcctgaccgatatctgtctcgaaaagctgaatccggtactgaatgcgatgacctttacggagcaatacgttccggttgcaaaataaagaatggaacggaggctgatccatgtcaaagtatgtgttaaaacggctgctgatcatgataccaactttgatagcagtaggaatcatcatgtttacgctgatgaattttgttcccggtgaccctgctcagcttgcgcttggcgctggtactcatactcctgccgaaattgagatgaaacgggccgcactgggattaaacaggccttttatggtgcgcctgggcgagtatctgaaaaatatttttctgcattttgattttggaaaatctctgattgacggtaccgagattaaatgggagctgatgaggcggtttccacataccttcaaaattgcaatttacagtattgtgctgacagttgtgatcggcctgccgctcggtatttacacggcagtaaaggctaattccgtaggcgataaaatctctctgtttattacgctgttgttcgactgcatgcccagcttctggaccgcgcttcttctggtactgctgttttctctgaaactgggctggctgccgtcttccggctgtacttcatttaaatactttattctgccgacgatagccaattccctgggaggtctggccggattcacccggcaggtgagggcaagcatgctggaggttatccgctctgattatgtgactacggcccgttccaagggccttccggagagaaaggtgatctacggccatgcccttcccaatgcgctgattccgattctgactgtggtcggaatgcggtttggctccatgctgggcggagccacgatcattgaagtgattttctcaatacccggaatcggacagtatctcgtaaattgtattaataaccgcgactatacggcttcgaccggcggaatcgtgttcatagcattcacatttgccctgattatgctgctgactgatttgctgtatgcgtttgcagatccgcggatcaaggcacagtacgtatcctcaggcagaaggaaggtgaaagaaaatggctgaagaattaaagagagaccatcataaatcggctgggaaccgcagacacgaaaggaaaaagaggcaccgccatcatattgatgagagcattaaaccgggctctgcaaaatacatatggctcaacatctgccacaataaaggtgcggtagccggtatggtgatgctggcggcaatcattgtgctgtctctgctgtctccgttcctgtgcaaatacagctattcggaactggatatgcttcacgcatattcgctgccgtctctggaacatttatttggctgtgatgagctgggccgtgatttgttgtcgcgcgtcctgtacggagcaagatatacactggtcatcggcgtcatctctacggtgctgtctgcggtgattggtatcgtgatgggagcggcggccggatatttcggaggtgttattgattcctgtctgatgcgttttctcgatgtgtttcaggcatttccgaccctggtgctggcgatggcgttctgtgcggtattcggtactggcgtggataaatgtatcctggctctgggaatcaccggaattcccggctttgccagactgatgcgtgccaatatcttacggattcgtaccatggaatatattgaggcggcggccacaatcaactgtccaacctggaaggtaattgcatcccatattatccccaatgcggtttccccgattatcgtggaaatcgccatgagtatcagccggaacggactggcctcctcctccttaagcttccttggccttggtgttcagcctccgaagccggagtggggagcaatgctggcggcatcaagaagttatatccgtgattacccgcatatggtaattattcccgggatttttatcgtgatcaccgtgctgagctttaatctgctgggcgacgcgttccgggatgcgctggatccgaattttaaagattgatgaggtggacaggatgagtgaacataaaaaagaaacggcattcttttccatacgtaatctgaccgtggaataccattcgggaaactccgtgatttacgccgttaatgatgtatcctttgatttaaaggagggggagacgcttggactggtaggagaaaccggagccggaaagactaccattgcaaaatctgttctccggattcttccggagcattccgtggaacggatagaaggggagatcctttataacggacgggatattttgaaaatgaccgataccgagcttcacagcctgcgtgggagtcagatatccatgatctttcaggatcccatgacggctttaaacccggtaaaaactgtgctttcccagatcgcggagggatacagacagcagcatggctgtacaaaatctgaggcgaataaaagggctgttgagatgcttgaactggttggaatcggtgcagaccgggcgggagagtatccgcatcagttctccggcggcatgaaacagcgtgttgtcatagcgctggcgctggcatgttctccgaagcttctgctggcggatgagccgacgacggctctcgatgtaacgattcaggctcaggttctggatttgattaaagcactgcgggatgagatgggaacggcgatggtattaatcacccatgatctgggagtcgtggcggatgtgtgcgacaaggtctgcgtgatctatgcaggacggattattgagagcgggagcaaagaagatattttcgatcatcccacgcatccctatacgcaggggctgtttgcagcactgccggatttaaaaaaggatgtggacagactatcaccgatcgagggactgccgccggatccgtcttccgcacggaaggggtgtgactttgcggagcggtgtccccataaatgccacagatgtgatcagtatgacaatgagatgagggaagtagcgcccgggcattattcccgctgctggaaaacaggaagatcgggggattagagaatggcagcattgttggaaattcagaatttaaagaaacattttaagagcgcagccggcatggttcacgcggttgatgacgttaccttcagcctggaggaaggggagaccgttggcctggtgggagagtccggctgtggaaaatccacccttggcaggacgctgattcatctgaatgagagcacggatggcagaattatttataagggaagggatgtcacaaagctgaataaaaaggaactgcagaattaccgcagagatgtacagatgatttttcaggaccccttttcctctctggatcccagacagacggtgcaggatatcattaaagagccgatgaagctgctggggaccatgagcgagtcagatttaaaggacagaaccagtgagctgatgaagacggccggcatcgaaaaacgattgagaatgtgttaccctcatgagctggacggcggacggcggcagcgcgtggggattgcgagagcactcgcgctgaatcccaaattcatcgtatgcgacgaaccggtttccgctctggatgtgtcaatccaggctcagattctgaatctgctgatggatctgcaggatcagatgggacttacctacttatttatcacccacgacatgtcagtcgtaaagcatatatccaatcagatttgcgtgatgtatcttggacagatcgtagagaaatgtgataaaagcgagctcttttgccatccggtacacccgtacacaaaagcgctgctgtccgcgattccgacggtggatatccatgcaaaaaaggaacggattctgctgaagggcgagattaaatcaccgatcaatccgggccccggctgccgttttgccaccagatgcatctatgcggatgagagctgtaagcagaactgctgtctgcaggaagtgaacccgggccattttgtggcatgcaataaagtgaaggaaatcgaggcgctgggatgaaaagtctgagagagagttttgaggaaaactacgaaccggtggaggtgccctgcagcaacaggcggggctttcggatccggtatgagtatatcggcccatggtatcagtggggggaagatgctgtccggcggaaacgggaaaaaaggacgattggaaatgcctgcgcggtcagtctgatgctgtttctggcgggatcaacccggaatttggctttaaattacgacagatacgtagaattcttcggaatgctctcggcagccgccctcctttttgaagtaataggaacggttcagttttgtacagccaaagaaaaagtgacggatatgaattattcagatataaatgcaaaactgaggctcgctcctacggttcatgcgctgctgctcctgtgcacggctgccgcctgtatggcagccatggcaggaaatggtgtgacggtttacggtcttggagtaaccatgtgctacctcggtgcggcggctgcatcttttatgatatatatccggtactccagactgactttatcatcattgtctggaaaaatgcagactaatatggtaagataaaaaagtacaataaaaacaaagataaaaacacagctccggtaggtagtccgggcgcagcggacaatatttgtgaaaacgctgtcagtaaccttcctccttaggtcgtccattctttgtctgttatgaatcatgtaaggaggatatcattatggacaaagtatcgctgacctttttagtgtttttcgaggacccgttctggatcggaatcgtggagcgcatttcggacggaacgatggaggtatgcaggattaccttcggtgcagagccgaaggactacgaggtatacgaatggcttctgaaaaattatgatgggctgcggttcagtccggccgtgaaagctgaagtaaaaaaagaacacaccaacccgaagcgcaggcagcgggaggccaggatgcagacggcagtctccggtatcggaacaaagtctcagcaggccttaagcctgcagcgcgagcagctgaaggaagaacggaaagtccggacccgcctgcagaaggaggcggaaaaggaggccaggtttgaattgaaacagcagaaacggaaggagaagcacaggggcagatgattctgtctcctgtgcttctttttgcattccgcttcatattataggataaagaacgaaatcgaatggaatatgatatgaaggaaacaggctatcggcgggaagcagcagtggaatatgcaaaaaagtgggccatgggcagaaatccacggtatctggactttgaaaattttggaggagactgcacgaattttgcgtctcagtgcatctatgcaggaagcggaatcatgaactacacaccggtgatgggctggtattataacagcagtacggaccggacgccaagctggacgggggtgcagtatctctataacttcctggtcaataacaaatcagttggtccctatgcagttgaaactgatcaggccggagtttcgccgggagatcttgtacagctgggcaatgccagcggcttttaccacagcccggtcatcgtcgcggtcacgggagagcgcatctttgtagcggcgcacagctttgatgcatatatgcgccctcttgactcttatctgtacgtgaaatcccgtttcctgcatatacagggtgtccgcagctggtagatgcagaaagcagaaaaagagataaaatctattgactattgggtaacccgatggtttatgataaaaaaggcaaagccaaaataaagaaagaaggggaatcatgtatatccatgttgagccggtaaatgataagaaccgcgaggcggtactggctctcaaaattcacgaaacacagaagggatttgtggaaagtcccgaacaatgcttaaaggaagcgtcggaagaaacatgctggcgtccggtcgggatctatgacggagatcagctgataggcttctccatgtacggctatttctggcagtatctgccgtttgggcgggtctggctggaccggctcctgatcgaccgggattatcagggacacggatacggccatgtcgtgctcccgatgatgattgaaaagctgagaaacgaataccacagaaagaaaatttacctaagcgtagtcgaggaaaaccagggagcaatccacctctatgagaaattcggattccggtttaacggagagaccgatgtccacggagagaaagtgatggtgctgaaagacggctgaattagttgacaggaatgtaaaaatatgatatattattttccaataaaagggagtagcgaaccatcttttgatggattttaaatcgtcttcttggtgttttcataaacacccgtataaaatgaaatgtgcaagacttttattgtggcaggaactaccacggtaagagtcttttcttttttcatacaggaagttccggccacgcacggaaacttttcgttgttgtcagacaggaaggagaatcagtatggaagaagagagaagaaaacaggaagcagaagaggcgattgccgccgcaaaccgtgtgctcatgaatttaagacaggccgaaaccgcgctgtcgagtgcaggcagctggggaatctgggatatgcttgggggcgggatgtttaccacctggatcaagcactccaggatcgacgatgcaaggctggctctggaggaatccaggcgaagcctaagaagcctgcgcagagaactgatggatcttgagataccgggagattttaaaattgatatcggagaatttttaaattttgccgactatttctttgatggactgatcatagactggatggtccagacaaagatcagagaggcatcagataacgtgaaggaagccatacgccgcgttgagaggctgcggaccaggctttatgaaatgctggaagcagacgcataaacctgaacgggaacaagcatccgcaggaaggagggctgagccggttgacggcccggcccttcttcgcatgaacagtgactgaaacaaaccggggagacccgaaacaatctgatgaggtctttcacgattttccggtttatggtatactgatactgcactgcgcagatcactgtgaatacagcacacgctgtctgcgccgggagcacctgatcttgaaatggaggaatcagattgaaagaacgcgagataaagtacgattttctaagggctgtggcagtaatagcgatcatgatggttcacgccataccagccgtttccgtgaatgataaacagtggtggttcgccgcagtgatgcagccgctgctgcttagctttgtcggaatttattttatgctcagcggtatgtttcttctggattcagcgaccggagatatcatgcagttttataaaaagcgggttaaggttatcgtgatcccgtttctctttttttcgggcctttactatctgtttgatgtcagccgcagcctggaagtcctgtcctggtgggagtatccgctggagtttctccgcgattttctaagcggtacagtacctatggcagaccatatgtggtttatgtatgtgatcatcgcactctacctctgtacgccgtttctggcccgcatgatgaagacgatgaatgatcaggaactgacctgttttatactgctcattcttggcgttcagacacttaccaactacgccggcggactgggcatcgggctggatcagattcttacttatatggtatttcaggggtggctgatatactatgtcctgggatatgcgttaaagaggctgtttcagcagaaggacttcaaatggttcgcccttgcgggaattctgggacttgtcctgacgctgcttcaaaaaaggtttacaccgggctttgtaccggggattcacgatttggcgcctaccatgattgccatgtcggcggcagtattcctgctgtttgagtgctgggggaatctaagatttaaggctgccagaatggtcattacctggctgagccgtcacagctactcggcctatctggctcactacctgatcctgaaggctgccgccgagccgatcgtcgaccagaccatggtgaggcatttttacgttccgcgtattgtgtgtacaacacttctgactgcggtcctgtcttttgcggctgcgtggctcctggacggtactgtgataaaatggctgcaaaaattcgtgaagacagataccggtaagtcaatcgaatcaataaacgtaaaatggaaggaataaaaaggaaaccgggaaaggaaggcgcaaagaatgtcaggaatgaactgtgaaagctgcatgtattatacctatgatgaggattacgagtgttacgtatgtgatatggatttggatgaagatgagatgatacgatttttaagaggggacagcggcggatgcgcccattaccagtatgcggacgaatacagagtcgtccgaaaacagatgtaaaataaaaaagcccataaaagggaggagccggtatccttgtgtaagaataccggcgattatgaaaaaaattttatctgatgtaaggcataagcatctttctcttatggtataagtatatccggtaaatatgaagatactttgaccgggatgtaaaaatattatgaccagattatgaacagagcgcacttcataagtaacgcgcttcaaattcagaaaccagaatcggtttggagaaaatataaccctgcaccatatcgcatttgatcgtacgaaggtagtcgaccatctcactggtctcaattccctctgccaccgtatggacccttaattttttagacagttcaatcagacatgcaatcacatcttttgccttttcgccctccatattgacgaagaaggaacggtccagcttgatcgtatccacatcgaattccttaagaagtcccagggaagagaagcccgatccgaaatcatccagagaacataaaaatcccagctgatgcatctgatgaatcatttcttttacgacgtcaatctgccggttgtcaaagaagatggattccgtcagctcaaattcgatcatacccggtggtatttcatattctgctgcaatatctgcaaattttttcagaaaattctggtccagaaaatggcggcgtgataaattgacagagacgggaaccggatttttcccggtggcgatccagttatgcaatgtttgacagacctgtgtaaacacatagaaatctaaccggcatattttcccattcatctcgaataaggggatgaaatccgagggaaagatgacccctttttccggatgaatccagcggaccagagcttcagcgccttccgcccggttactctccagcagaacctttggctgaaagtataccttaaaatcgtgattttcaatggaagtttcaaataaatcgtttaattcctgttccagcatgatgcgttcggtcaggctgttgtcgtaaaatgcgcatttctcccggtggccggctgtctggctctggcatgccagtctggcgcggtcctgaagccgtgcgatttccagacctgggtcatccacgatgcaggcacccagccggaactccaggcggaaggcagtcaggtccgtatggtgaaagtcatttatctccctgataatcccgtccaggcgcttctggatcctggcaggatcatgttccttcagacacaggaagaagtggtccgattccacccgggcggcaaattcattatcctcagaccggagccggtgattcaggacccggtatatataggccagaatttggctgccggcctgaatacccaggcgttcgtttatcagcttgaagccattgacattcatcagcaggattgaatacgtattgggtaccattgtgtcagccaattccgtgtattttagctgaaaggcagcgtggttgggccctccggtaagcgggtccacaaaggccaggcgttccagctgtttcctgtgtatatgatagaaacggtacacggaaaacaggaacagggaaaagagcaggacggtcagtccaatgatgacaaatgactgcataatataacgctccgcgccgctggacaggaagtccgcgggtatgagggtcaacagaaaccagtcattgacaccgagggaattgtaggacaggatcagctcctcttttgtaactgccgtaaattttaagatgccgctgcggttatttctcatgttttcctgcatttggtgaatatcttctacgacattcctgtctttattctccctgaaaatattgtccagccggagaaatggtttcaagtctgtgggggagattaccacctgtccgctgctgtcggtgatgcagctgagcattttaccgtcgaaatttttggaggaaatcatggcctgcatattttccttgcttctcacaccgatgaggacttcatcgatctggccttcccggaatacgggagctgaataaaatatacttttgccccctatgtagtcagcggttacctcaccttcaaaagaggcgaggacgccgtcaagttgaaagaaatccgtggaagtaatccagggcggcgaaaaatcaccttcggaggaaatcatggtaccatctctgtgcagaagaatcagcggatcaaactccagtatttctgcttttctgtgtaataaatctgccgcttcatcctccgaacacatctcatccagacgggaagccgtatcggatatggaggccagactcgtcattttattgaccagcgcatcatggatatcacgggcggtctgtacggttacatcatccagatatttctgcgtgcttttattgagggccatacgcaaatctgccgcgttcctgattaagattataaaaaccaggagaatccctgcagagaggaggctgatttgcagaccttttctaaaaaagggattgtaaaaatcagtttttttccggtttcgtattttcatctatattgtctccgttttaatacatcatgataatccttatcatttattttattttaagttaccctgtttgagaaatcaatatgatttttgtgtacgtcagcatatagtacgcgtgagaaaatgtggtataatgaagtcggttttatcatgatgcaggaagccgggaagaagaaaagaggctaagagggacatcgtttgagagggaaaggttatggaagagaagagtactctgtttgaatatttatatagaaatctcagagaacagattatgacaggatacttaaaatatggtgatccgctgccttctatgagtcagctcagcgagaattaccacgtgggaatccggacggtaagggaggtactggcggcattaaaaagggaggggctgatccataccgaggagaggcggacctccagagtagcctatcagccggttgatgagatacagaaggaagatgttttgagatcggtactggagcggagaactgcaattctggaggtctataagacgatggaactgattatgccaaggctttttgcctgctccatcgcttcctgcggcggagaaaaggtgaggcttagttttcagcatttaaaacgaaacagtaaaaaaggaattgacctccggtggaaggcttcatcgatggcgcttcatagtctgttggatgcctcgggcaacctgttgtttcgggatatatttacgagtcttgaaatctgcgcgcgggttccatttttcctggagttccgggagtcaccggcattttctgcttccgccatggcttataaagatccaatgtggatgctggaggcagccaatagcggcgatctgaaggagatgcggcgttgttttgaaaccatgtatcgagcgattgcggatgatgtaaagcagtttctggaagaactggacgctatggttccatttccggtggaagaaacagactgctgttacagctggagtccggagatcgggcgaaaccattactacatgcagattacccgtgatttgattgataagattggagtggggatttaccgggatggaacgtttttaccgtccgaagccgcgctggccgatgaatataaggtctctgtgtcgacgatcagaaaagcggtcgccatgctgaacaaatgtggtttctgtcacacatacaatgtcaaggggacacaggtaactctgtttaatgacgatgcgaccgcacagtgtatgaagaacagggtattaaaaaacgatacgctgttgtatttgagcggccttcagtttatggctgcggctgtctggcctgctgccatgcttaccgctgaatcgataaaaaaggaggcggaggagctggtggataaaatggaacagccctgggcggttccgctggatcttattacggacgccatgaaggaacaccttccgttaaagccgtttcagatgattttgcaggaggtgggcggacttctccactggggctattactatagtttttacagtgatggctccactcgttccaatgagctgaatcaaagatgccgaattgctttggactgcctgatgaaaggagagaaacaggcgtatgcccgccagctttcgctttgctactgtcatgtgctggaagttgtcagggaatacatggtgcagtgcgggctttatgaagcgaaaaatctgatcacaccgcagccggagcaatgggaagaatatgaaatacaaaatatatggtaaaaaatgagatatggctgcgataaaattacattctgctccgttgtaaggatgaaaaggaaaaaaataattctgcatgaaaggagcaaaagatatgaagaaaaattttatggcggccatggcggcagcggcagtggtaacattagggggactggggctttatctgggaggaccgagccagtatctggcatttgatattaaccccagcatcgagatcaaagcaaacaggctgaatcaggttgtttctctgaagggtacaaacgaagacggaaaagagctgctgcagggataccacatggaggacaggaatctcgaccgcgtcctggaagatgtggttgatctgctggatcaggcggggtattttaccaacaaggataaaaatgatatcctgttgaccgtaaaatccggttccgcctcggagactacggttaaaaatgtgaaccgtcaccttgccggctatctggaggaatgccagatcgaggggcgggttctggatcagcacgtcagtttgacgaaagaactaaagaagctggcagaggagcatcacatatctgcaggccgcatggctctgatcgaaaagattttggcaaaggatgacagtgtaacggccagccagctggctgatatgcggatcagtgatcttgcagcttacgcgagggatgaggggatttccctcgattccctggaagataagctggatcacgccaatgactggtaccgcagcgacaggcttgaaatgctggaagatgagctggatcgaatggcagagagtgaggcggctgcggacgggaaatatggtgatgatgatcgtgatgacgatgatcgtgatgatgatgaccgatacgatgataatgaccgatacgaagatgacgaccgatacgaagatgacgaccgatacgaagatgatgaccgatacgaagatgacgaccgatacgatgatgatgaccgatacgatgatgatgaccgttacgaagatgacgatcgatacgaagatgacgatcgaaacgatgatgatgaccattacgatgatgatgactgtaacgaagatgacgatcgatacgaagatgacgaccgtaacgataatgatgatcataatgaccacgatgatcggtaagaacatcaatcgatgagtgccagaaacctgatatggcagcttataactaaatttggattacatgaaaaagagaaagtctgattaagggagaacgagaatattctggataagaagatcgcggacacagtatcccataatggaaatgcaggtgcgcggtgaggagaaatgagtatgatatttttcatggtaacgggaggggagccggaggtatccatacaacggcttaatatagatgaagatctgattgtgcggattgaccgggatgaccggtccgcgcttgaggaattctatacccttacggagcgtaccctgtacagttacgtccttgcgatcgtgaaaaatccatacgatacccaggatattgtacaggacacctatttaaaagttcgggcatccgcgcatctgtaccagaaacagggaaaaccgctggcatggctttttacgattgcccgaaatcttgctatggatttattccgacgaaactcacgcttcctgtcagaagaagcatttgagatggatgacacaatggaatactcctatgtaacggaaatgacagacagactggttttagagactgccatgaatattttaactgagcgggaacggcagattcttctgcttcacctggtagcaggaatcaggcacagagagattgctgcgaatctggggctcccgctgtccacagtcttgtcctgctatcagcggacattgaagaaattgaaacggtacctggaaggaaaggagtaagggcgatgagtaaaaaaatagagacatcacagatcaatcaatcgctgaaccgggcagtcagccagcttcctcagccttccctgcaaaaaataattgatacacccgttgtaaaaatggagcggatggacgatatcaccggacaagagcctttaaaaggcggctggttctgcaggctttgcagtccggtacaggttcggcgtatggcagctgtatgcggttgtgctgtgttctttctcgcagcgggcatcggcggagtatattcttatcagaatttgatggtagacagtattgttgatatggatgtaaacccaagcttcgaactgaagatcaataaaaaagacagagttctttcctttgtgcctctgaatgaagatgcggttcaggctgcagaagggcacacgtacaaagactggaacattgaggaggcagttaaggatctgtaccggattatggaagaaaaagcgtatctgacggatgacaggaaaaccgttctgatttcagtggaaaataagaatccgaaccgtgtagaccagcttcagagccagctgagcgcttgtattagaaaaactgcggaggagagcaaacggacagtccatatcgtgacacaggaaaagaaaaaagatggggcgttggatcagacggcgctgaattaccatatatccagcgggaaattacagtttatccgtatgatgacagctgcttacccggatctcgatgaaatgacgctgtcgagaatgtccatggaagaactttaccgcataatctttgagcgggaaaaggaaaaaccagtatggcttcagatggacgaggaagactggaatgagtataaagaagaaatgagaaaagcgaaatacggcgatagagattcgtctgatgatagagatgacgacgatttcgatgacgacgatttcgatgacgacgattcagacgatggcgattcggatgataacgattcggacgatcatgtatccgacgacagggatccggctgacgatgactttgacgaccgcgaatccgacgacaggaattcggctgatcatgatgacttagacgatgctgattcgcctggtaagaacgtagacgacgattccgaagacaaggccccggacgatgacgaatcaggtggtaaggcctcagacgatgacaattccgatgaccgggactcagacaatgacgattccgaggacgaacctgatgattaagccgccttctcaaaataccccgggccacgacagaaatttccgtcgtggcccggggtttatgatctgattcattttatctcaactaatcgagttttgtataaccgtagctgttgacaatcgcatccagcttgattccattcttacaatccggacagttatccggctcggagagacggaagtcaggaagatcggaagaatcaaataccgagttaaccggataaccgtcgatctcgttcactgccgcaaagataacggagatgccttccagaatgccgccgtaggattcgatgcagcgaatgctctttaaaatagtacggccggacatcgcagtagcaagaacgactaatacgtgtttatccttcagcatatgcttgatgttgtcacgaacgaccatctgtcccgcagaatcgaattccggtgttacgatgtaagtagtcttgtggatattggtggtggtaacgccgagctcggataattcctttgccacataggcgccgattacctcgcagccatccatacagatgatggtatcgattggagtcttggaagcaaacgctttggaataatgcttgagttcttccgctcctacgccaatcagacctgataaatcgacacggtttacgtatctcttaaccatggatttggcaacctgttccgcttcctcctgacgcatcttcagcgtggtcatgtcaatgtaatagttaatgtgaaaacggtctgatgagaaatgtccttttgttacttttaaagccagtttatcattgtctctggcgcgaattttggtttcctgccccatactcataaaaaacaacctcctttgtcatattacttctattataaccgatgtcaaccgcagaaactataacaaaggttaacttttttcgttattctgaaaaatgatagctgtccagaagctgatttttcatatgccacagctcattggagagatccacatgtacctcatgagggttcacaagacggcgggattcatcccagagtgtatccagttcttttttgcagtacgcctgaatgtccatgacggcaggcgaatcgtagacacattctccgttcttaaataccggaaccatcagatcacgcagatggtaggtgttgggcgccagatgcgtctttttccaggtctcgatcggatcaaagagcagcagagaatgattttcattatacttttcgccttccaggcagattaaatcggcaatcatttttccggtttccctgctgtaaatcctcttaatgcacttattgcccgggttggtaatcttctcggcattttcggataacttaatcttcggaacaaattttccgctcttcttatccaggatggcagcaagcttatatacgccgccgaaggacgggcagtccttggaggtaatcagatttgtaccgacgccccaggagttgatggcagcaccctgaatctttaagctgttgatcagagactcatccaggtcattggaggcagagatgactgcgtcggggaatccggcgtcgtccagcattttttttgctttcttggacagataggccagatcgccgctgtccagacgaattccgtagaaggtcagcgggatacctgcctccctcatttccttaaataccttaatggcattgggaacgccggacttcagtgtgtcgtaggtgtctaccagcaggatacaggcggatggatacagtctggcataggtgcggaacgcagtcagttcatcgggaaaactcatgatccagctgtgagcgtgggttcccttgaccggaacgttgaacatcttgccgcacagaacattggaagttccgatgcatccggcgatcatggcggcccttgcgccatagattccggcatcgggcccctgagcacggcgaaggccaaattccataactccgtcgccgcctgctgcgtatacgacgcgcgccgtctttgtagcgatcaggctctgatgattgataatatttaacagtgcggtctcaattagctgtgcctccataatgggagcgattactttgaccagcggttcacgcgggaagatgacagtcccttccggtatggcgtagatgtcgcctgagaatttaaaatggcgcaaatattccagaaagtcttcgccgaacagccccgttgagcgtagatagtccacatcgtcctcttcaaaatgaagatctttgatatactggatcacctgctccagaccggcacagatcgcataaccgttgccgcccggatttgtgcggtaaaatgcatcgaagattaccgtctcattggcatccttttctttgaaatagccctgcatcatggttaactcgtatagatccgttaataaggttaaattgcgctggctcatatgtgttctccttctgaacaattaatgtagggggcggagcgattgggaccgcaaggtccggggactctgtcctttttggacattataccataactttacaaaaacgcaatgtgattgataaaaaaataacaaactataatatcagaataattctggaacattgacataacaaaaagtttaatagaaataaaaatataaatatttgcaataattatatacaatttgacaattacgaaattatttattaattttttataaagagtcttgcaaaatgaagagagatactatataataaagctatcaaaagaaagagatacaagatatagataatcttcccgggaacaggaagcgggaaggataaaaatataactgaaaaggaggtagattccaccgaaaacataagtttcgtctgatttccattttggaagcaggcaataggaaaaaccattcagccacagtgaaaagccattccttctatgatgaataaatgcgaaagcatggatgaagtagttggaaaaaatctatatatcttttacatatgcctatattccgttataaactgcaaaggaaaattcatcgtatgagtcatatgacgagaaagtatgattcgtccgaacaaaggtttccacatatgtagcttactaccatatagaagaatgaaaatgacgatgcagagataaaccagatgatagatgaggcccggtaatggagtggcgaaagggaaaaaaatttcatatagagcatccaggtacataagtatcagtgacaaaacaaaaagtgagggtaaagtccaatggatgaagtagtttaggaacgggtatcgaaattcatgtgaatgagtcggtacccgtttctatttgtgttcagactgtttgtgttcaggcggtttaagcagacagccggacggctgcagcttcctgtagagagtggacgattgcaaaggttgagaattaatgaaaaaatacttgacagaacaaactgtaactgataatattacagtatgataactgaaacaaaaaaagttacagaatggagcggacgagatgataacagggagatttttgattacggcgggtatcgcggcagcggtcctggcattaacggcgtgttcgagtggtcagaaaagtgctgccggtaaggagacacagaagacggaggcacagcaggaaaaggctggaacagagaatcggccggcacagcaggaagagaacggaacagaggcccggacagcacagcaggcagagagcagaacagaggcccaggcttcgcagtatgtaaagtacaggccggaagaggcaaaggaagttatggattcggatgaagcgctgatcgtggtggacgtaagaactccggaggagtacgcggagagccgcattggcgatgcgattaatattccggtggaagagatcggagaggagatgcccggggaactgccggatttggatgcgaagattatggtttactgccgaagcggcgtgagaagtaagaacgcagcggagaagctgttagaccttggttataagaatatcattgatataggcggcattaaggactggccctatgagaccgtgtccggcgaaaaacaataaaaatagagaagacaggaaaggaaggtttgacatgaaaaagtttgatgcggtgattataggatttggcaaaggcggaaaaacactggcgggaaagctggcaggcgaaggaaaagccgtagcattgattgagaaatcagataagatgtatggaggtacctgcattaatgtgggatgtattccttccaagtctctggtgagaagttctcagatcacagagtcaaagggagagatttcttttgaagagaaggcggaattatacaggacagccattgaagaaaaacggcgtgttacatccatgcttcggaaaaagaattttgataagctggatcatctggaaacagtgacgatttataatggaactgccagtttcctctccaatacgcaggtaaacgtagtgccggcagacggttcagaagaatttaccatagaaggagaccagatctttatcaatacgggaagcactccgtttgtgccaccgattgagggaatagaagggaatccccaggtgtacttaagcgagacatttatggatctggagacgcttccgaagaagctggtcatcattggaggcggctatatcggactggagttttcgtccatgtattccggatttggctctgatgttacggtcattcagaacgaagcccgcctgattccgagggaggatgaagatatcgcagcggagatccagaaggttttggaagaaaagggcgttcaattcgtgattggcgcggccatttccagcatcagaaaagaaggggaccggtcttacgttcattattctgccgatggaaaagagggtgatctggaggcggatgcaattctggtcgctacaggcagaagacccaacacggcgggactgaatctggaggcggccggtgtcgaagttacggcccgcggcggtgtgaaagtagatgatgcttatcggacgacggctccgaatatctgggccatgggagatgcagccggggggcttcagtttacctacgtttccctggatgatttccgaatcgtgtggtccagtcttcacggcggagcctatgatgccagggcagccaggagaagccatattccgtacagcgtttttattgagccatccttttcaagagtcggtatgaatgaacaggaagcgagaaaggcagggttagacgtgaagatcgccagactgccggcgtctgcgattccgaaggcggctgtcttaaataaaaccaaaggcgttttaaaggcggtaattgatgcaaagacgaatcagattttaggcgccatgctgttctgtgaggaatcctacgagatgattaatatcgtgaagctggcgatggatctgaatgcagactacacggtattgagagatcagatttatacgcatccgattatgagtgaggcgcttaacgaattattcgcggtctgatacgggcagtttgatgaggtctgatacggggcataatgacgaaaataagcggcagatacccgaaatttcgtcttttacttgacatttcctcccataaaacctataatgagaagacatataaggcataacctgccattatattataggaaaaaagacgatgaaagagacagtaggaccgtgggaaatccaaagcgagccggggatggtgaaagcctggtgagagtagtcatgggaacgaatatcactctggagtctccggctgaaagctgtgtaagcagtaagccaggacgtgaatcctacgttacagggaacgcatatgtcagtatgctgtaataggtggtttagcgaagcacggccttcgtcctgattacgggacgagggccttctttttttactattcataaaggaggtcaaaagagatgtataacaaagttcctacagacttgaattttgtagcgagagaaaaagaagttgaaaaattctgggaagatcacgatattttccagaagagcattgataacagaaaaaaggctgaaacctacacattttatgacggtccgcctaccgccaacggaaaacctcatatcggccatgtccttacccgtgtgatcaaggatatgattccgagataccgcaccatgaagggctgcgacgtgccgcgaaaggccggctgggatacccatggactccctgttgagctggaagtggagaagatgctgggactggacggcaaggagcagatcgaggaatacggtcttgagccgtttatcaagcactgtaaggaaagcgtatggaagtacaagggcatgtgggaagatttctccaagactgtcggcttctgggcggatatggatgatccgtacgttacctatgagaattactatatcgagtccgagtggtgggctctcaagcagatctgggaaaaggggcttctctacaagggatttaagatcgttccttactgtccgcgatgcggaacgccgctttccagccacgaggtggcccagggatataaggacgtgaaagaacgctcggccatcgccagattcaaggtaaagggcgaggatgcctacattctggcatggacgacaacaccgtggacgcttccctccaacgtggcgctctgtgtgaatccgaacgagtcctacgtaaaggtgaaaaacggagattatacgtactatcttgcggaagctttgtgtgatacggttctgaacagtgaatacactgtactggagcgttttaccggcaaagatctggagtttaaggagtatgagccgctgtttgatttcgtgcatccggcgaagaaggcgtactatgtaacctgtgacacatacgtaacactgacagacggtaccggcgtcgttcatatcgcaccggccttcggtgaagacgactccaaggtgggcagaaaatacgacctgccgttcgtccagctggttgattccaagggtgagatgacgaaggaggcgaaatgggcgggcaccttctgtaagaaggccgatccgctggttttaaaggatctggaagagaggggactcctgttctctgcaccggtattcgagcacagctatccgcactgctggagatgtgacactcccctgatttattatgcgagagagtcctggtttatcaagatgaccgatgtgaaggaggacttaatccgcaacaacaataccatcaactggatccctgagagtatcggcaagggccgtttcggtgactggctggagaacgttcaggactggggcatcagccggaaccgttactggggcactcctttaaatgtatgggagtgtgagtgcggccatcagcatgccatcggaagcatcgaggaattaaagtccatgtcgccgaactgtccggatgacatagaacttcaccggccatatatcgacgcggtgaccatcacctgcccgaagtgcggaaagcagatgaagagagttccggaggtaatcgactgctggttcgattccggttccatgccgtttgcacagcaccattatccgtttgagaataaggaactgtttgagcagcagttcccggcggacttcatctccgaggcggtggatcagacgagaggatggttctattcacttttggctatctccaccctgatctttaacaaggcgccgtataagaacgtcatcgttctgggccatgtacaggatgagaacggacagaagatgtcgaagtccaagggcaacgcggttgatccgttccaggctctcgaagagtttggcgccgatgccatccgctggtatttctatatcaacagcgcgccgtggcttccgaaccggttccatggcaaggccgtaatggaaggccagcgcaagtttatgggcactttatggaatacgtacgctttctttgttctctatgcaaatattgatgaatttgatgcaactaaatacaaactggaatacgacaagcttccggttatggataaatggcttctgtcgaagttaaataccttaatcaagaccgtggacggtaatctgggaaattatcagattccggaggcggcaagagcgcttcaggagtttgtggatgacatgagcaactggtacgtcagaagaagccgtgagcgtttttgggccaaaggcatggaacaggataagatcaatgcctatatgaccctgtataccgcactggtgaccgtcagcaaggtggcagcgccgatgatcccgttcatgacggaggagatctaccagaacctggtatgtaacatcgataagaatgcgccggagagcatccatctatgcgattatccggtggcggatgaatcctgcatcgatgagaagctggaagacaacatggatgaggtcttaaagatcgtagtgatgggccgtgcggccagaaatacggcgaatatcaagaaccgccagccgatcggccggatgtttgtaaaagcgcctcatgaactctctgtattctatcaggagatcatcgaggaggagctgaatgtcaagaccgttgtatttacagatgatgtccgcgatttcaccagctacagctttaagccgcagttaaagacggtcggcccgaaatacggaaaacagttaaacaacatcagaaaagccctttccgaggtggacggaaataccgccatggatactctgaatgaaaagggcgctctcacgttcgaatttgacggcagtgaggtggttctgacgaaggaagatttactgatcgatacggctcagatggagggctacgtatcggaaggagataataccgttacggttgtgcttgacacgaacctgacacctgagctgatcgaggaaggtttcgtccgcgaactgatcagcaagattcagaccatgcgtaaggaagcaggttttgaggtgatggatcatattctcatcaccagcgaaggcaatgagaagattgccggtattctggaagcacatggcgaagtaataaagagcgaggttctcgcagaagacatcacactgggtaaggcagcaggctatacgaaggaatggaacatcaatggtgagaatgtcacgctgggcgtagaaaaagttcagcggattgaaacagtgaaccaataggaggtcattcacaatgagtatgggatttaataaagaaacctttaagaaaagcgttatttacaacgttaaaaatgtattccgcaagacgatcgatgaagcgactccggagcaggcgttccaggcggttgcctatgctgttaaggatgtgatcattgatgagtggattgcaactcacaaggagtatgagaagaaggacgtaaaaaccctgtattatctctccatggagtttttgatgggccgtgcccttggaaataatattatcaatatcatggcgctgccggaagtgaaggaagtgctggatgagctgggtttcgacttaaacgccatcgaggatcaggagccggatccggctctcggcaacggcggcctcggccgtcttgccgcctgctttttagattccctggcgacgctgggctatccggcttacggctgcggcatccgctaccgctacggtatgttcaaacaaaagattgaaaacggctatcagatggaagttccggatgactggttaaagaacggttatccgtttgaggtccgccgtgcggagtatgctacggaggtgaagttcggcggttacgtcagaacggtctgggataacggcagagagcatttcgttcaggagggataccagtccgtccgtgccgtgccttatgatatgcctatcgttggctacggcaacaatgtggtgaatacgctgcgaatctgggatgcggaagcgatcaataccttcagcctggattcctttgacaagggcgactaccagaaggctgtagagcaggaaaacctggcaaagacgattgtagaggttctctatcccaacgacaatcactacgccggtaaggagcttcgtttaaaacagcagtacttctttatttccgccagcgttcagcgggcggttaagaagtatatggaaaagcatgacgatatccataaattcttcgagaagaccgtgttccagttaaatgatacccatccgactgtggctgtgccggagttaatgcgtatccttctggacgaatataatctgacatgggatgaggcatgggccgtgaccacaaagacctgcgcctatacaaaccacaccatcatgtccgaggcgctggaaaaatggccgatcgaactgttctccaggctgcttccgagaatctatcagatcgtggaggagatcaaccgccgtttcgtagagcagattcagcagatgtatccgggcaaccaggataagatccgcaagatggccatcatttacgacggacaggtgcgcatggcaaacttagcgatcgtaggcggattttctgtcaacggcgttgcaagactgcacacggagattttgaagaaacaggagctgcgcgatttctatgagatgatgccgcaaaaattcaacaataagacgaacggcattacccagagacgtttcctgcttcacggcaatccgctgctggctcagtgggtgacgggaaagatcgggaatgagtggattaccgatctgccgcatattcaccgccttgcggtctatgcggatgatccgaagtgccagcaggagtttatggacatcaagtaccagaacaaggttcgcctggcaaaatacattaaggaacacaacggaatcgatgtggacccgcgttccatcttcgacgttcaggtaaagcgtcttcacgagtacaagcgccagctgatgaatattcttcatgtgatctatttatataatgaactgaaggataatccaaacatggatatggttccgagaacctttatcttcggagctaaggcggcggccgggtataagcgggcgaagctgaccatcaagctgatcaactcggtagccgatgtgatcaataacgacaaaaccatcgacggaaagatcaaggttgtgtttattgaggactataaggtttctaacgcggagatcattttcgcggcagccgatgtcagcgagcagatttccacagccagcaaggaagcctccggcaccggaaacatgaagtttatgttaaatggtgcgctgacgctgggaaccatggacggcgccaacgtggagatcgtggaagaggttggtgaggagaacgcctttatctttggcatgtcctctgacgaggtcatcggttatgagaacagaggcggctataatccgatggagatcttcaacaacaactatcagatccgccgtgttctgatgcagctgatcaacggatactttgcacctcaggacccggaactgttccgtgatatctataattctctgctgaatacgcagagcagcgaccgcgcggatacgtattttattttaaaggatttaccatcctacgcggaagcacagaagaggattgatcaggcctacagaaacgaaacgtggtgggcaaaggcggctatcttaaatgtagcctgcagcggcaaattcacctcagaccggacgattgaagaatatgtccgtgatatctggcatctggaaaaggtgaaggtagagatttaggagatcagttaaggccgttgggaataagtcttgaaagagaagtacggtgggaaaatgcagcgggaaataccgtcgccatggcggagccccggcggtgttttcctgccgtgctttttttgattcggaagagtcagaaaacatcataggaagcgggattttatacttcgcggcggccgccggctggacgtgtcttcctgtctgaacggttcgcgtcagcgggagtaaaagggggagaatatgatagagagtacaattggaaaaccgggatatgaaccggccagaattacgatttatgtgaaagacagagggatcgtactggaggaatcctccatggcccttgtaaacagggataccggcctgattattgccatggggaatgcggcggaagaggctatcgatcaggctgtgacacctgtaactgccgtgaatccgctgcggagagggattattgcctcctatatgctggcggaaaggatgttctgttcttatctgcgccgggctttgggatacgatcgttccatggtaaagcgcctgaccggtgccaccgtgaagaagccgcgggtggcggtgtgcgtgccggaggagttgactgaggtggaggagaaggcatttatggatgccttttaccaggcaggtgcgagagacgtttgtctgaccgggcagccgctggaagaagctgtaaggtgtctggagaagccatgcaccgtatttgtggggattacatggaatgggaaggaaaaggaacgtttctgcataaatgagaattgtccgcatagaattttttaaaggaacttgcggaggttttcggtggcaaaaaaaatagtcatggtatgcgtcatggcattgctgcttccctatataataacccttgcatggacaggcagaatcgaggaaaagaaggaagtaccgcttattaccagcggaaaaaaagtgattctggaccggaaaaacggggaatcctatatggatgtggaagagtatctgccgggagtggtggcaaagcagatgcctgccgagtatgggaaggaagcgctgcgggcacaggccatcatagccaggacgtttatttaccagaagatgaacggtgagaacgaggtgaaggagtcggagcttcatatggaatatctggaagagaagcagatggaggccatgtggggaagtgaatcctttgtaacgtattttcaggcggtggaagaggcggtgcgctcgacagcgggcagggtaatcacctgtgacggcaggctcatcgagccgctgtttcaccgtgccagcaccggaatgacgagaagcggggatgagagccatccgtacctgcaggcggtggccagcaaacgcgatgtggaggcggaaggctatctgaccatgatggtatggagcaaggaggagtttgccggaaggattaaccagattgccggcagtgtaccggtggatgcgggccagcttccccagtccattcagatgattgtccgtgacgacggcggttatgtggggcagattcagatcggtacgaaggtgtataccggagaggaagtccagtatgcgctgggactgccgtctccgtcctacactctggaggagtacgacggcggaatccgggcggtgtgccagggggtcggccacggttacgggctcagccagtacggtgctaagtgcatggcggaggagggaaaaacagcggaagagattcttgattatttttataaaaatattgttctgatttctgaataactctttctcctttggtaagaatattaccgaggtgataaacgtgaaagagaaaatgagtcaattgttcaaggataaagtattccttgtcctgttggttttaggcctgctgactatagtagctgcggcaggagtcattaccattcaaagaggaaacgatggcggtcagagtccatatcttgaagtaccggatcagaagggcgtcattgcagaagagacgattccacaggagaaccaggtagcagttgccggtgattccaacgcggagcagaatacggacgcagatacacaggtcgccgactccgccagggctacagcgaaagcagagacagaagcagaagtgccggcggtaaaggccggaacagaaaaagaggcggccgcagcgctggtcctcaattttaatgacgcaacaaagatggcatggccggtatcaggaaatgtcattctggattacagcatggagtccaccatctatttcccgactctggatcagtataaatgtaatccgggcatcgtcatccagggcgccgtgagcacaccggttatagcacctgcaaacgcaaaaattcaggagatcggttccaatgaagaactgggcaattacgtcgttctcaacatgggaaatgactataccgctgtctgcggccagttaaaggaactgcaggtggtggaaaatgagtacgtggcacagggcgatgtgctgggctacgtagcagaacctacgaaatattattcgatcgaaggcgcgaacttatacttcgagctggaacacgagaatcaacccgtcgatccgctggacttcatgcagtgaaaacgagcggaccgtactgttccatacggggaagaaaagaagacagggcagaagacttatttaagttttctgttctgtctttttgtaatggaaaagcactcctgttacaaaaaagtccgccgggcagaaggcgttctccgcgcgtctctccggaccactaaaatgttataaaaaaataataatttgttcatatgtgaagtttagtaatatgctataataaatacgaaaataatgtgacgggagtgcggctatgaacatattgttttttttgacaccaaagtgcgaagtggcatatatttatgaggacgagacgctgcggcaggctcttgagaagatggagtatcacaagtactctgcggtacccattatcagcagaaccggacgatacatcggtaccatcacggagggcgatatgctctggggaatcaagaataagtttaatttaagcttaaaggaggccgagcgtgtaaccgtggcggcgatcgaccggagactggacaaccgtccggtatttgccaattccaatatggaagatttaatcgataaggcgctgaaccagaactttgttcccgtggtggacgaccagaagaattttattggaatcattaccagaaaggacatcattcgttattactatgataagtcccaggaatgcagtcaggcggcgcagacaggccggaacactggagataaggcgcgtctggtgcttggataagtatgacggagatcaggcactctgagtggagcggcggcgaaggtgaaatgtgaaaagcctgccggcggaaacgacagttacagaagtaaccgtttccgccggcaggctttttcattttatcacggtttatgcttttgacattttttctttctcttcatttaacagagggatagagtcggcaaaggtgttgtcgatcactttaagcagcgtgtcctgctccagagtcggggagtaataaaagccctgctggtagtcgcagcctgcttttgtcaggatattgacctgattctcagtttccacgccttctgcaatgatgtttaaatttaagtctctggcgatgtggatcagcccttcgatcacgcagtgggatctcgggtttgtctccagctgccatacgaacagacgctccagcttcagcgtgttgaccggaagctccaggatggtggctacgccggagtacccggaaccgaactcgtttaataccagctccacacccatatcggacagttcctgcagcatgacgttgatgtttaagtatgctgtggttaaggcgctttcctggatctcgatggcaagcttacccttcggaatctggtaggtatcgatgacacgtctgacctcgtccagaaaatcctcctgcaaaaagaggatggaagagatcggaagtgcaatggaatcgaattccttgccggcttcggtgagttttgcgatacactggcccaccttgtccagtgcaaagtactcgagggaacggatctggccggagtcctcggcgatgggcagaacttcactggctccgatgagccccagccccttgatgaagatgcgcatataaaactctgcgcggctgaactttccggtctccatattaagggtcgggcggtaacgaacctcgatctcctctttttctatggcggtcttcaaatataatgcgatggtgtggcggcgaagcagctgcttctggagcgtgctgtcgaacatgatggcctggttggggccgccttcctccgcttttaagactgccagatcgagacattttaataactcgtccggcgtcgctgcgtggccgggataggagcacatgcccatctgtacagaacagaggcagtcagtgccgttcactttccaggcgtgatcaaactgttccgcgatctcttctgccagatcggaggcctgcccctgtgagtactggtccaggattataatatattccacaccaatatagtgataaacaggttttccggtcttttccttcaaataggagagaatctggcttaagagattctcacagtaatcgtaaccgaatacctgattcaggcgtttgaaattttctatgtatacctttaatacaactccgcggtctgacggtgtatccatgacttccgacagatgacggtagcatgcgtcacgttccagcttgctttcttccagccgctctgtgatcactggttcggattccgccggtgatggagtggggattgacttcttttgaaaccaactcatgtggtctgcctcctgtatttgtaatgattcccgcgggcaatgaaccagatgggcgcactaacaggaccatctggcgacagcatgcccccggtttgccggggactgccgcgtgggttggattcccagcttctgactgtgggaatccggctatccttattgtagtataaaacaggcctgaaatcaaggaagaattcggtaaatatcgaagctactttacgagaagcatgacagctccaagcagaaacagaataattccggttaaccggttcagaagcttcggatctgctttgtttgcgaaaacggcggcaatacgcgcaaacaggaaggtaaacaggatacagagcacaagcaggaacagatccggcatgcctccgatggcgaaatgggagagggagccggtcagcgccgtaaacgtcatgatgaatacgctggttcccacggcagtttttaattcgtatcccagcacgctcgtcaggagaagcagcatcatcataccgccgcctgcgccgataaaaccgcagataaaaccgaccacaatgccgcttacaatggactggatcagtttttgccgtacggttttggacgcctgcgcgtctttggtcgtgagaaccggcctcacaatgaatttaatgcccaggagcatggtcaggaagacggaggcatttcccatggcatggttggggaccagggaggagatatagctgcccaccagggtgaaaagcagaacggcggccatcatgacaagtccgtttctgatatcgagatttttgtgtttcccgtaggtataggccgatacagcgctggcgaggacgtcgctggccagcgcaatgccgatggcctgataggcagggactcctaaaaatgtgatgagcatggggctgatgacggctgccgcgctcattccggcaaagcctgtgccaaaaccggcgccgaggccggcgaaaagacatacaattattttttccaacatggtaagaccttctttttctatagtttctgttttaatctgtttgtttgagattatccatcatccgttttagcagatctgtgaaaatctgccgctcttcctctgatattccgcggttcagccgatcgaagaaatcctgctgcgtctgctttaaatcccgggcagcaggaagggctgcttctgtcagcttcaaatggatttttctgcggtcggcagtgtcctcacggccttctaagtatcccaggccggtcagtgactccacggaagcggatacccccgattttgccagcatacggaaggttgagatatcctttgccgtgtcgtaatccggattattgtatagaaacagaatcacatctccatccatcagcgataacccgtgtctggaggcagccgtctgaatgctttgattataaattttatgaaaggattttgctccggataaaagatcacttatcaccatatcatttcccccctttcttccatatgaacagtccctgtgtaaatgggactgcaatgaatagttttaaaatgaacagttctttttagaactatatcaaaaggcttcgattttgtcaatagaaatacgggggaagaagtaatttacaggagattggggaatgataaccgtgaggtgaaaatatgaaatcaatctggacagagacaacgaaaatacccggaagaaatcctcttcccggaaataagaaaacagaagtcgcagtaattggagccggactctttggcattctggcagcctgttatctgaaagagcagggaaaagaagtgatagtgctggaggctgaccggatcggaagcggtcagtcgggatatacgactgcgaagattacctcccagcataacctgatttacgaaaagctggtcaacaccatgggggagaagtacgcctcctcctatgccatggcgaatcagcaggccattgaggattacaaaaagttaattaaaaaacgccgtattgcctgtcattttgaggagaaggacgcttatttattttcggtcaatgagtcggaaattctgaggcgggaagcggactgcgctgcgcgatgcggattgcctgccacatttgtcagggagacggagcttccatttcccgttcacggggcagtccgctttacgggtcaggcacagtttcatccactggagtttatcgaggcgctctccggggatttaacggtctatgagcggacgaaggtccgggaggtgaaggggcatgaaattatgacggacagaggtgtggtgagagcggatcacatagtatttgcctgtcattatccgtttgtgaatattccgggcttctattttctgcgtctgtatcaggaaaagagttacgtgatggcgctggggccggttaaggagcttgagggaatgtatctggggattgataaaaattcatactccttccgaagtgcaggagatacgcttcttttaggccatggaagccatcggacaggcaaatgtccggagaagaatccttacgaggagatgagacggttaaaggaacatttttatccggggacggaggaattcggaagatggtcggccgaggactgtatgagtgtggacagtgtgccatacatcggccatttttcaggcgtgcttgcggactggtacgtagcaacgggatttgggaaatggggcatgacgacgtcgatggctgcggcgaagatcgttgcggcacagattatgggaagaaaaacgccgtacgaggaggtatttacaccgcagcgcttcagaccaaaggcggcggccgtcacgtttctctcccatgcgggtcattctgccgccgggcttatgaaaggggcggtgcccaaggtaccccggtgtcctcatatgggctgcaggcttgtatacaatcggatggacgggcgctacgagtgcccctgccacggatcacaatttgaacaaaatggaaaaatttgctctggccctgcacaagaaagccttcctttcataaattgatattagaaactcattattgaaaggagtatttcatcctatggattgttatacgaaacaaagatgtcctggctgccagccagtacctcagggcgctaaatgccgccaggatgttccaatggggcctggtccggtgatccgccctgatcttcctctgggatccggccctgctgttcgccgtgatcagccagcgcggccggaaatgccgatggggcgtgtaggggcaatgccgccgaatatgccgatgggccccgggccggtgatgccgccgaatatgcagccggaaatgccgatggggcgcggaggggcaatgccctcgaatatgccgatgggccccgggccggtgatgccgccgaatatgcagccggaaatgccgatggggcgcggaggggcaatgccttcgaatatgccgatgggccccgggccggtgatgccgccaaatatgccgccggaaatgccgatgaatcagggatttatgaattccccgtgcaatatggatcagtttccggtagctatggcttatgttccgtggcagcgctggcagcaggtctatcctgttgacaaagcaataaacagagggacgattttccccgatctggataaaccgttttccatggggaggtgcagataatggcaaatatagatagaaactgcagcgctctgcttcgcaaggtttatgaggcgagcttcgctgtggatgatgtgattctctatctggatactcatcccgatgatcaggatgcactgaattattaccagtatgtatcagagttgcggaaacaggcaatggatgcctatgaggctcagtgcggcccgctgatgattgacgaagtccggtccgacaattactggacctgggtcaacaatccgtggccatgggaaggagagtgcggctgatgtggagatatgaaaagagattacagtatccggtaaatattacaacaccgaatcctaagctggcgacgtttattatgagtcagtatggcggaccatagtgcggaaacagataagtacccggaaagccgcgcatcatgggttttccgggttaaattgaaatataataatagcattttagttttccgtgttctttatcgtacacgatctttttgacgattccgcgcaacgcattgcccttgacttcatagcatacttccggatttttcagaaggtcgatggtgttctggattctgctttgcaatgccttacgatcgtcttccacgtttcgggcgggaccgtccttcaattctctaagctgggcgttcagctcctcacgttctttcttaatcctacccctattatctctgtattcttctaatgtgtcaatcccgttttcataagcgtcacgaattctcgactccttgacggccaggcgggagagcgcagattccagttttgatatggaggcgtcggagtctggaacggactgcctgatatactcgtacttgatgtgaggatcatttacagccatatccagagattttaatatggatttttccgctttgcttaccgtaatgctacaggattcgccatgaatacctttagcatatttccaacattggaagaaactggggtttcggccggtatttttagatttattatagccgagactggcaccacaatatccacattttaataggccagaggcccagtggaggcaggaagaggtttctctgcggtttaatggtttgtattctcgctgcatacgtgtctgattatcttcaaagatagcagtgatggaagtcctgcattcgtgagggccctggaaggtgaagccattccatgttacaataccagcatagaatttgttcttgagaatgccttctatggctcttttatcaaaaagatttccacgtttggtacggtagccgtgatcgttggcactccttgcgatggcgcgcatgtctgcacctgagtgataagcttggtggatgtattccgcgatggcatattcggattcgtttataatgaagggtttgccaccaccaaccgcctgatatcccagacaaggggcagattgataaccttcgcgcaatgctttttctgtcatgccacgcagaacttcgccagacagattaaaggagtaatactcatcaaaccattcgatgatcgtttctattagtcggccgaacattccttctgcgatcggttcagatacacttttaatatctacactgcattttttgcgaaggatccctttgtaaaaggtgctttcttcttgatttcgggcgaaacgtgagaacttccagagatagagtctgcgaaaaggtgcaggtgtttgtgactttgctgtagcgatcatacgctggaattcttcccggttatcggcccggcgtccggagaccccacgtttttcaatgaagacgaactcgtctggtatgaaaaagccgtcctctttggcagaagctcggattactctaagctgggcgtcaggggaaagttctgtctggtcatcggtactgacacggatgtatgcggcacctatttgtaagtactctgtttcttttttcatgatatatcacttccttgattaaatgtacgtgaaaagagtgcaaaaaatacgccccttgccaggacgcttcaggaatgatataatttctttgggtaaaagaatatcttctgggcgtacccggtagagaatctatgtgaaaagcttctgtgttggtagcacaggggctttttgctttctaaatttcataattaaatatattctgataattattgttaatcaatttatccacacggcggacaattaaacttattccgactaagcgcagttgaatggtactatatccaatagttatatcagcctttcctatgtttccatcactcataaaaaatatagatccatatgaggaacgatttaaaaatattggctctccttcaacttcagaaaaatgtaaaaccataggatatttgtttttcttacgtgtcgccgtataaggcgtacattctacataggtagctggaagtgaatccaataaaattggttttatatagtcaaaatatatattttcagtgcatatataaaaatcatttccatctggcaggtaagaatcggcctgttgaaaaatatcattaatgtagttaattgctgaaagagcaatatattgattgtttttattaagcgaaaaccatgcaattccatttgtatgttgtaaatttaatatccaacgtaactcaaacggtaagtttggaaactttgccatatcatcaacagtaatattattgtttatttcaaccattgttttttgtcttaattcttttttttgacggttttctttataatgtctttcgcgctcaatttcatcttcaccctgcgtaccatatccagctaatgtgatttcatttgattttcttatgcatgtaccagcaagttcgtaatccccatttgatttatatatatgaatagcgttttttcttaagatatagtcaattccataatttttgccaaatacatttgcagttacggacaaacacggaatcttttcaacgtcctcttttttcatgatatcatattcgactccggctattttaaaagaaacgcttttgtatttaaaaatatcatcaaacgtaaggtctttatccataagccacctatcttaatcgtgattcaacggtataatagtcgcaaccgtataattcagctatatcattactgctatagtttgaatgctctgtaataaaatcattagttataaccatgaatgccgaaaagaggtttgcttccctttcaacgcgtgaattgagatatgtataatttctcaaaaagtaacaattctgtttacggtgcataattgcgtgtcctaactcatgggccataacaaagagtaactctggaccctctatacaattattgataaaaatacatcggtggttttttgcaaataaatagcaccccgcatattcccccaacgggccaaactgaacttctatctttaattgtcgagcaattttaaaagggtcagctgtaccacaaagccttatataataagcaacaaggcgcttaatgcgttctttatcccccatatgctcacctactttttgttcttgtaagggttgtatttttctttattgattttcttcagatggtgtaacatgatgtccaactgctgggcaaatagctcttgtgtttcttctggtatttcatccccctcaaaacttgcaggcccggcctcaccttttcttagcttctccataatattacttaaatcctttgcaatatctcgttcatcctttggggtgagtgtaatctctttcttttccggctcttcttttcccgtcatcagataatcaacagttacaccaaaatagtcggcaattttttgtagtttgtcttgtttcggagtacttcttccggttttccagtctgtaaaagtagaccccgctattcctgttgctttagatactttataagcggttactccatatttttctaataatttcacaaatatttcgtacataaaatacctcctaaaaatatttatgaaatcataaataaaacgcttgactagttatgaatcccatgatatagtatagtcatggttatgaaatcataaataaaagcgaactataaaatgattttcataattgtttcggaaatgctaatgtttaatgtggtaattaaactatatcacatttccgaactaaattcaatatttatttatgaaaatattatgtttataggaggtgaaaaaagtgtataaaaaatttgctgaactactttttcagcgtgggttaacggcctatagggtatcaaaagataccgggatacccgccaatacttttactgactggaaaaatggccgtagcaaaccaaagtttgacaagttgttaatcctggcaaagtatttcggcgttccggtggagtactttgcagatgaaaggaaggaggacgcatgaacgatttaacaagaacagccatcacatcaatggaagccgcggagtggtgcggtaagaaacacaatgaattactgaaagatattcggcgttacatcagccaattaggagaggggaaaattccccacaccgatttcttccgggaatccacctacgtaacagagcagaacaagacccttccctgcttcctggttacaaagaaaggctgtgagtttatagctcacaagatgactggacagaagggaacagagttcacagcgcggtacatcaaccgtttccacgagatggaagaggggaagctttcctgccccctcaacccacagatcgcatccagcgtggcagagctgggtcgggtaacggaaagggttatgaagaatcagggctcagcaccatataagattgcggaagcatttaaaatggagtgcgaacagttcggcatccaactccctgcggattttgtgaaggtgccggagtatgaacagatggcactgtcagagttcataaagtaagcaacaagtacaaccagtcatacatacaatctaccagagaggggtggagatatggcgaaaaaggaactgattattgaaaactacatagaaattgatggagtagacgtcccgatggatactctttcagaagaaaaaagagcagaaattgcaatattattacaggatacggcaatgtcgtatgcgggatacaaaagagtgcagactcccggttgatccgggactgatggacatgcagtgggaggtgatggacatgcagaagtacattgacaacctcgacgacttcgaggacgacagccggccgccgattgtggactgggtggaatggctgctggttgggatctttgatctggcaggagcgggggcttgtgcctacatagggtatctactattggtgttagtggtggaagggaggtggatcggttgagagaaaatgataacaggtgtccccggtgctggggaaaatacaaattagatgtaagacccagacctgtatctatcagatcatgggaggaaaatggaagaaaggttactaaccgtaaatatgtatgtacctgcgggtgctcatgggaacggacgactgtagagcgtagccttacatcataggaaaaggagggtgatccgcatcaacccaaatgtaacctgcaacacttgccggtaccgcaaccgctgcatagagcagagccgtcggtatccgtgtaaggattataagaggagggacaacccatgcagaaagaacagcagctcagggtatggatacagaaacagaagcgtctcatcagcgaggccgcggagcagaaagaccgggattacatagccatgatgtggcagggatttttaaacggcctgtgtctgaccaatgcaatcacgtggcaggagtatcaggagttaagtagggaaattgtagagttcgctgagggattcgaggcggcatgagaggaggtataggcagatgaagaaacgattagagaagaaggttgagaagcggaagcgcgaacagatccacaggttacttgatctggcgctggatatcaacggactggaacccagaagtcagactataacaggtaatcttccgacagtgttttttgagttttacgggcatgtaggactggcagatattcgggtatattccgctggctgggcttccggaaaggatccagacgtagacatgtatatggaggcatgtagcctcgaaaaactttctaacgtggtacaccgtatggaggcgttaaaagcagaaaccccaggagcggcaactcccagggaatcaaggtaactactaattatttcacacccttagtataagggatctcgtggaggattgcaagatggaaatgaatacacagcgtatggacgcatttgtgaaagatgtaacagactgcaggaaggcgattgatctctgccgcgcagcaattaagaagctgggagaacagccgttgcatctactggtttcaaatgacctggagagaatcacgcttaatagtaaagaaatcggattaagcaaagaaagtcaggctgctatcgtaatggtagtcaagggatcgttagaggccagagagaacgagctctgctgccagatggacgagcttatgggaaattacggccgtactactgacttcgaagcagtgccgccggccctgacacccaaacagaagcgccgccagtgttacggaccgattaatccggatgatgtggaatggtaaggaggctgcgatgggagattatcgaaaactttggatcctgctcagagaacagcttacaaggcaggaaaatgaatcggaaaagtattctattgagcgcgatgtaatccataacgtgttgacacgaatgtccgagatggatgccgcggagtttttggaggattgaacgatggtaaaagcaaaagatttaaatgttggacaggttatccggttggaatgcggagatgccggaaactggggaaactttgaagttgataagattactgtcctggaggattccgtggacgtgctctgccattatggagtggtacatatggagttttcatgggagctggataagatgctggaggtagtgtaatggaaaaacttaatttcagaactctccaggcggacgagattgactgtcggatagcgacgataaaagaaagcggcttgtccctgcttctttataaagatgccagagttgatcagaatatgcttgatgaagccgttggtccgatgaactggcagcgtcaccacagccgcgacaatgcaaactgtactgtcgcgatctgggacagcgaaaagaaccagtggatcgagaaagaagataccgggacagaaagctatacagagaaagagaaggggctggcatctgatagctttaagagagcctgttttaactgggggattggccgggaattatacacgtccccctttatttggatcagtgcccaggactgtaatataaaaaattccggtaacaggttcacatgcaatgattcgttttatgtatcccagatcgggtatgacgaaaagcgcaatatcaattctttaactattaagaagtcaaaaggaaacagtattgtgttttccatgggtaagaagccggaaaaaccagatgaaggtcaggcgaagcagcctgaaaagaaatccgagggcattacaacgccgatgattgaatcaattaagtctttggtcgaaaaacacagcgggaagggcctgaaaatggagaagatccttgcaatgtacaagattaaggatatcaatgaaatgacaatagagcagtataaggactgtatgaataagctgaaactatatgaggagaaaacaatacatgaataaagtaatactgatgggaagactgacaagggatccggaagtccggtactctcagggcgagcgaaccatgaccttagcaaagtatacgcttgccgtggatcggaggggccgcaggagccaggacggcaatgagcagaccgccgacttcctgaattgcgtcgcattcgacagagcgggcgaatttgctgagaagtatttccgccagggcatgagggtattgatttccggaaggattcagaccggaagctacataaacaaggatggcataaaggtttacacaacggatattatcgtggaggatcaggaatttgccgacagtaagggagcagcgtcaggaggtcagacaaacggccggcctgaacctgcagatgctgatgggtttgtgaatatccctgataatctggaagacgacagtctgccatttaactagaggtgattattgcttgaatatacagatcgacagccgggaaaaggccaaagcgatacagaaaataataaaagagtttgatcggcagggtgtggaccactttgtctcgaagctttacgtcggggattatatgaactttgataatccccgggtgattatagacagaaagcagaatctgacagagctttgcggtaatgtctgccagggccataaccgattccgggatgagatactgcgggctaatgagcacggaattgaaattataatcctgtgtgaacacgggaaaggtatcgagcgcctggaagacgtgatctggtgggacaatcccaggcgaattgagaggtacaaggatcttcatgcgggtaaatggctacagcgggaaaccaaagcactgaccggagagaagctgtataagatcctctcgaccttccagcggaaatatggctgtcagttcctgttctgcaacaaagaggagacaggaagacggattatagaactgctgggaggtgagctaattgacagtggaagagattaaggcagcatacagcatgagggacatcgtggagcggtacggcttccgcccaacgcgtgcggggttcattccatgcccctttcattcaggtgaccgtcaggcctcgttgaaggtgtatgaccgggactttcactgccacgcctgcggcgctcatggcgatatcattgactttgtgatgatgatggacgacgtagattttaagacggcctatcagagcctgggcggagagtatcagaaaccgacattttctagtcgcctggccgtgtatgaagctcaaaaacagcgcgagatgcgtcataaaatgcaggagcggattgcggcgcagaaagacttgaacaatacacttttaactgtctataggacttacatggagcgctcagaaccgttgagcgacatctggacagactgttataacgccctgcagtaccagctgtatctacaggcggaattaaacgacatggaagcgaggtggtagcatggtgccgttgaaagaactgacggctgagacgatcctgtcaaaggagatattgacggaagtattcgatcaagaagatgagttataccgggccgagctgctggcctcgctgggcctgcgggccgccgagctgaaagtaaagacggagttccgggagatggtggcgacctacaaacggatcgaaaaagaaatgaagcggcaggagcgtgataaaaagagtcagccgtgcacgttggagcagtggacgaattttgacggtccttacgacaatatgcagtgcaagcagtggattgcctcggagaacggtatctacctgaacaatccatcaacaggctataccgatatcctggcctgctatcatcccatcttaccaatcgagcggttaaaaaacctcgagaccggagaggagcagatcaagctggcttataagcggaatgctcgctgggaggagattatcgttcctaagacattggtgacgtcggctaacaaaatagtagccctgtcaggccgcggaatcgccgttacgagcgagaatgctaagtacctggtgcgatcctggctgacgtcgaaaacgccaatgaggagcatataaacgtccagtattccacgtcaaaactggggtggatccggaaaggattcctgccttatgatacggaaatcgtgtttgacggagatacccggttccggcagatttatgacagcgtggagcaggccgggagccgggaagaatggtttagccatgcgaaggagctgcgccgatccggaaggatcgagatcaagtttatgctggcggcctcattctcgagcgcccttgtgcagcccctgggcggcctgccgtactttgtggatctctggggagaaaccgaaggcggtaagactgtagatttgatgcttgcggcatcggtctgggcggatccagatgagaacgcctacattggagactacaagactacggacgtagcgctggaggccaaagcggacatgcttaatcatctgcctctgatcctggacgatacgagcaagaaaaaccgtaagatcgaagacaactttgaagggttggtatatgacctgtgttccggaaaggggaaatccagatccaacaaggagttgggccttaaccgggagaaccgctggaagaactgcattctgaccaacggagagcggccactgacgtcctacgtgacgcagggcggcgccataaacagaattctggaacttgaatgcggagaccatgtttttaaggatccagggtacacagccgagcttgtaaaacgcagctatggtcacgcagggcgtgagttcgtggagctgataaaggatctgggaatagatgccatccgggagatccaacaggaatttctccgccagctggcagacgatgaaaagatgcagaagcagagtctgtctctgtcgattgttctgacggccgataagcttgctacggactatttattcaaggatcgtcagtacataagcctggaggaagccagagaggtcctggtggaccgtaacgagctttctgacaacgaacgatgctaccagtttttgatggataagattgcgatgaatccggcgaggttcgacggggacaacgagaacatagagaaatggggcgtgattgaggaaggatatgcaatcatctacgccactgccttctcgacattatgcaaagatggaggattctctcgaacttctttcctgtcatgggctaaccggaagggtctcctgcagacggaaaagagtgggaagaagctggacaagatcaagagctttaagggtaataaaatccgttgtgtgttcctgaaattgaacgacggggccgataaagacggatttatccagacagatgaacaaatggagctgccatttgagtaaagagtaacctcgaatgggttaccgcaaaaagctaggttctatgcgggtttgagggctgttttatagcagagtaacccggtaacccacaaaaacaggctcctatatagagaaaaaaatattttacaatctttgtattatatttaacaaagttttataaaaaatgtctcgcgcgtatagagattataaaaaattaggttactaggttaccgtgaccgaaaaagctagattctataagggttttagcggtaacccaacaattaaaaaaatgggttacagtaacccgaaaataggttaccggagggaataacgtgacaaacgatgagatcaaaaacattcttaacgaggttcataacgttttctgggtgaaatggagaaacaaggtgccagagcgcggatcctatgaatgggaacagttcattcaagacggaggcgagttgatgaagaaatacagctattgctctttggttatcaaaaatgttaatgaattgattggagaaatgacagatcgtatggaggcaatggaaaaagatgccagaaaaaaagaaaagtgatccttcagaaaaaaaacagcccatcgtgtgttccatctgcgggcaggagatttacggggatcatgtgtacataaaaaccagaagatggacggaattgcggatacactttgagtgtatgccaggagggagaaaatcatgaagataacaatagcacgtgggactcttaccaaagaggagcagtataaactgggagagttgcttttaaaggctgggtatgtggtaagtgtccgaaaggggaccacgaaggaaacgaaatctatgacgattattaatctggtagatcctgagccagaagctgtagaagaagatctgtcttagagttggaaaaattaaggtttgcgaaagaaggtggaggacgatggagcaaagggatgatgccgatttatgcgcaggtagcggtgattttgaggtgatttatttgcttatacctcttgttacaatttgcataatagcgtttatcgtaactcattaacttaatattttcaagatacccggaaaggatgatgagattgcgaaaattattattaaaactggcacatagggttctaaaaaaatatggggtgattcctctggatttcaaggacaaagtcctttttatgggaaatatttatgaaattcagagttatgttatttcgaaagaattttttaaaactgatgttaccgtagaaatgtgtgattgcttcaaattccctgattgtgggggatcatgacatgaaattccggaggagtggaggaaagtgatacatgtttaattggattcggcattgcctttgcatacatgattttgaaaaagtgaaacaaaatgagtatccagacaagacagtaacgacgtatttgtgcaaaaaatgtggctggattcggaaggtaacgacaagataagttagattaatattccgggactgccggaagaaaggaaaaaaatcatgggattaattgatgtgtttgagaaagaggatcgaacggaaataaagttgagccaactctgtgaaatgttaagcgcaggtgccaaaactgaattgcttatgaacgctgtaaactgtgatgtgcctcaccagtatatcagagaaatggtaacaggagaaaaagaagtgtctgattgcgtcttattttcaacagaaaaacgataatcggtagtattaggattttgtaaaggagtgattgaaatagaaagagtattagatgcttgttgtggtagccggatgttttattttgacaggcagaatccagaggtaatctatgctgacaacagagagttagaaacaaccttgtgtgacggacgtactctgctgattaaacctgatgtaaagatggacttccgggatatgccatatcctgataacagtttcaaagttgttgtatttgacccgccacatttgattcatgcggggacggggagctggttggccaataaatacggaatcctaccggctgactggccggagtatttgaagcagggatttagcgagtgcatgagagtaatggagcctgatgggctattgatttttaaatggaatgaggatcaaataaaattatctgaagtattgagagtttttgataaaaaaccattactgggagaccagagaggaaaaacaagatggctggtctttatcaaataaactgatatttgaccgattaagaaaggagctggaacctttccggaaaacaggcgcgccgggttccttttttgaaaatgaaagcaattatgaaatacccaggcagtaaatggagtatagcggattggattatcagttattttccgcagcaccacagctacattgaaccgtttttcggtagcggcgcagtgctattcaataagccgcggtccaatatcgagactgtaaacgacctcgacggaaacgttgtaaacttgtttgagtggatcaggaaagacccggagcgcctagcacgggaaatatattacacgccttacgcaaggcaggtatacgattcagcgtttgaatcggtaccagaggacagttttggacgggcagtgaatttctacatacggcttaatatgggacacgggttccggaccaatggcgaaaaggtgggctggaagaacgacgtacaaggcagagagcgggcctatgctgcgaaagattggtgtaatctgcctgagaaaataatggcggccgctgaaaggctgcgaggcgtgcaaattgaaaacatgccggccgtggaattaatcaaacgcttcaaccattccaatgtattgatctatgcggacccgccatatgttttatcggccaggcacgggaaacagtaccggtatgagatggacaacggggcgcaaactgaattactggaagttcttcacgcccataaggggccggtactaattagtggatatgatagcgagttgtataatgacagcttacacgattggtaccgtgtagaaactgactgctattcccaaatcgcatcaaagaagcgtgaagtgttgtggatgaattttgcccctgcagggcagatgagcataaaagactttctggaggtgagaccatgagcggtttgattatagattgctttgccggtggcggcggggcaagtgtgggtatagaaatggcactggggcggccggttgatatagctatcaatcatgatccgcaggcgattcggatgcacaaagtcaatcatccggatacgctgcatctgaccgaggatatatttaaggtcgatcttaaaaagtatgttgctggccgccatgtagcacttatgtgggcctctccagattgtaccagtcatagcaaggcaaaaggaggtcagccgcgtaacaaggggcttagaattctgccatgggcggtgtacaagcacgctaaagcaattcttcccgatgttatcttgatggaaaacgtcgaggaaatacagcagtggggaccgctagacgaggcagggcacccaataaaagaaagagccggagaggactacaaacgattcatagcggccatgaaacgattgggatatgattttgacagccgggaactggtagcggcagattacggagcgccgacaacgcggaagcgatggtatgcaatcttccgcagagacgggaatgtgattacatggccggagccaacacacagtaagagcggagcagatggccggctgaagtggctggaatgtggggattatattgattggtcagatttggggcgttccatatttgaccgtccacggccgctggcagatgccaccatgaaacggatagcaaacggatacgttaagtatgttgttaacaatccgcaaccgtacatagttaacaatcagagcgccgtttcctttatgatccagtatcacggagaaacacgggaaggtgattcgcgcggccaactgctgacggagccgataaagacaattgataccagcaaccggtatggtctggttacggcatttgtcactaaattttataaatccgggacaggccagatgtgcgaggagccattacataccatcaccacatcaccggggcatttcgggcttatatctgcattcttgattaagtattacggtactggttgcggtcaggaagctgggcggccgttgggaacgataacaacaaaggatagattcgggttagtaaatgtgataacggacatagatggagaacagtatatcttgaaagatatcttcctccgtatgctgaaaccagaggaacttaagagaatgcagggatttccggaggattacatacttaaccatgacatagagggcaagccgtaccccgtcggggaacaggtggcgcggatcgggaatagcgtggtgccgataatggcgcaggcactggtatctgcaaactgtccgtatctcaaagtcggcgaaagaatgccgaatatgaggatcgacgacagccacgaacaactacggtttgcttaacaaaacgatcatttagtggaggaataaccatgtttgaaaaaggtgattttgagtggtgtgaagagtgcatgtgcgagaattgtgaaaatagcgattgcgataattatcaatgtaaaaattgtgacggaacccgtgaagagcattgccccacttacatttagtgaaagaaggtgaaaaacagtgataagaacaagtaaagtgagttcatattgttctgtttgcgggaaggaaatatcgttaaaagggaatgatttgaaccagatatttatacacccattacacgcattaaagcatgaaatccatttatggagaacacaccgcagaaggatgttgaaggtaagtgatttgctaaaatgtctaattcaggtggcaatcggatttttattaagaatcgtgatgattatattatggattgttactttcccattttgggcaatccatgagttttgcgcctaaatcgagattgagaaaaacttacggagtaatacacagggaaaggagcggccggcatggcaagaccgagaaaagcagaaggagagaaatacatacggcaggatataagcatggagccgggacagtttaggcggctgatggcctattgccagcgtgaggaccgctccatctcctgggtgatccgaaaggcgctggaaatgtttttagtgtgtagtgatacataacgatacgcaactaaatcgagatttatcgaacgaaagaaagagaggatataagatgggattaatagatgcattcggaaaagaagatagagtagaggttacattttctgctttctatgaactgatgaaaggctgtgcagaaagagacttccttgctaaaggcataatgtgtaatgtaccacatcggtatatgcgcgagatggtcactggaaaatcagaagatgaaggcaatgacaatgatcgggtagaagacaactgacattttccgaacgaagggaggagatccgatgataaaacaaatggacgagatggtgtccggcctggcagctgcacgacgtaggaccaggcggatcatgagatattggggtagaactatagaaatggtcattgtagcgattacgatgccgatccgggtgattccgtattcgatatacagaaggagacgccatggatagaaaagaagaacatgcaatagcccttcagtcggcacaggccagagcggcaaagcaggaatacatactgaaagggcctaggccagagacacacagcgcgacgatgccggcctactgctacacaccggcgtgtccggatccaaagttacgggcgccgatctggaggaggaacaaacatggcatttagcaaaaagtatgaagtatatgatcgtggcgccctgctgggtcagtactatgctgatgaagtatcggagcttatcgggatcccgttgagaagagtttcggcctatgcggccagcggggccagatttttaagacggtatacgattgaggcagtggacgatactgagccagggtgggccgaggagtgggatcgggttaggatcgagaaactggcatggttaagaggaggtggagccgttggacaaagaggtactggagcagtacagcagccttaaggcagagtacctggatttgcaggacgagatcaggaaactggaaaagcagatccgaaagatggaaacgagccggtgccaggtgtcggactccgttaaggggacgcggcctgatgggacatatggcagtatcacgataaccggctttcctgttccggattattaccggcggaagaagctgctggagaaacgcaaggcaaatctgtctaagtttgagttgcagttattggagctgacgaacgatgtcgacgactacataaacagcctggccgattccagaatgcggcgcatgataagatataagttttttgatgagctgtcttgggttcaggtggcgcatcgcatgggagggaagtatacggcggatagttgtcggaagcaaattgaaagatttttggaagaaaaataagtttgtccgttttgtccgcttgaagtgtgatacactttaaactggaagatctgaaaaacggatttcctcccccaattgacggccgccggcttttaccggtcggtggctgatttatccttcataattcatgtttctccctaagaagcacctgtcgcaagatgggtgttttcttttgtcaaattttgtggtaggatgaaagaaattttgaggagatatgaaaatgttaggattaataataaattccactgcaacaccgcctaatattgatggaataaagacagatgcaagcataacgattttagttgtaatagctgtaattgcactaatttccccaatatttgttgctactataaataaccattttcaacgaaaaaaccatttattagatttagaaaatgattttttgaagtttcagtataattcatactatttaaaggcaacagaagcattcgataatatgttaaagtctgttggcctttttctgggagacgcaacggatttggataaatatgctaaagccatttcctgtattaatgtcgcctatgcttattgtgatgaagaactagctggaaggctagatactttgcggatggagctcggtcaatttacaggcgatgtgacagatggatcgggagattctaaagggagttttgcggattcgtcagaggcattaaaggcagtagcgatttatattagtagatacaatagagagttttttaaaattgaaaagaatgagaggtggtgattttcactgcctcttttattttagccagataggaaggtgaggtgatggcaaacaatgaaaacttaaacggacacggattccatgaacgaacaacggaagaacagcgagcaatagcaatcgccggaggaaaggcttcgggagaggcacggcgccggaaagcaaacttccgtcgtacattaaatatgcttctgacggcagagattgatagcccggaatggacgccggtgctggaagctcttgggctggagagcacattggagagtgccgtcaatgctgccgttattaagaaggcgttggccggcaatgtgaaagcctatgaggcgatccgtgacacgctgggtcagacgctcaagtccgatctggacatagaggagcagctggcaaagatcgtccaccttaaggctcaggccgatgcattacaaccgaatagagacaatgatcaaccggtaaagtacacagggattccatcaaacatgatagccccggtatttgctccggttgtttttgatatccaggagcatggtcatacggaatatgtcttccctggcggccgtggctccacgaagtcgtcctttatatcccttgaagtgatcgacctcatcatgaacaatgaccagatgcacgctgttgtcatgcgtcaggtcgcagatacgctgagaggatctgtgtaccaacagattctatgggccattgaggctttggagctttcggaggagtttcacgcaactgtcagccctatggagatcacccggatcagtaccggacagaagatctacttccgtggagccgatgatccaggcaaggtcaagtccatcaaggtgccgtttggatacattggtatcctgtggctggaggagttagatcagtttgtgggacctgagtcagtccgtaagattgagcagtcagtgattcgtggtggcgaggtggcttatatctttaagtcatttaatcctccgaagacggccagtaactgggccaacaagtatatcaaggtaccaaaggcgtccaggctggtgacagagagtacctatctggacgtgccacctaagtggctggggaaaccattcctcgatgaagctgagttcttaaaagaggtcaatcctgatgcttatgacaatgagtatatgggcgttgcaaacggcagcggaggcagcgtatttgataatgtgactatccggaagataaccgatgaggagattgctcagtttgaccatgttcttaatggtgttgactggggctggtatcctgatctgtatgcatttgtgcgagtgcattatgatcccgcacggctacggttgtacatctggcaggaatatacctgtaataagcagagcaaccggaagacagcagacaagctgattgagatggggattacaggtaatgatctgattacctgtgacagcgctgagaacaagtctgtgggagattataagtcctatgggcttttggcccgggaagctgacaaaggcccgggaagtcgtgaatactcctttaagtggctgcaatcccttcgggagatcattattgataatgtcaggtgccccgtggcagctcaggagttccttgattatgaatatgaacgggataaggaaggcaatgtgatcagcggttatccagacggaaatgatcactgcattgatgctaccagatacgctactaaccggatctggaaaaagaagggccagtaaaaggcaggtgatagagtgtttgaacgaattaaaaatatagtgaagggggtgtaccggagaatgttttcgatcaagacattaaaagaactgttcgggcaggacattgcgatcagtcaggatatgatatcagctatagaaaaatggggatccatgtaccgggggcaggctccatgggtagatgagcaggtagactcccttcaaatcgaacagggaatctgccgtgagtttgcaaacgtctgtctgaatgagatggaatccagtatatctgttgagccgctggacaagatctatcaatctgctgtcagggatttaaatgagaacctgcagagcggccttgcccttggatccttttgcattaaaccactaggagaagataaggtggaatacattacgcaggaacggttcattcctctgaagtttgatgcgcgcggcaggctaactcgggtagcgtttgttgacgttaaaaaggtagcagattacgattattttatccgctttgaagttcatacctgggaagagaccagagtacttaatattcagaatcttgcgtatcggtccagtgacatggcgagcatcggaaggtctgtaccacttagtatggtgccggaatgggcggagctccccgaaaatataaattatgccggagtggagcggccagacttcggctattaccggaaccctatcaagaatgaagtggacggttccccatgcggggtatcagtatatcaatcagcaactaatttgatcaaaaagacagatatacaattcggtcgtttggattgggagtttgagagcggagagcgtgtcgtgcatgtggatgtcaccgcgctgcaggaagcacctactctgggacaagatggtaggacgcgatatgaaatgccaaagctcaacaagcggctatatcgcggactgaacctttccggaggatcgaacggggaagagttgtataaggagtacagccctgagttgcgggaccagaatattatcaatggcctgaatgcttacctgcggcggattgagtttaacgtctgcctgtcctatggtgacttatcagacgtcaatgacgtggataaaacagctacggaggcgaagatcgcaaagaaacggaaatataacatggtgaaagcaatccagtccaaccttaaagactgcctggaggatctggcctatgctttggccttttacaatggcatgacccgaagtggatatgaattcctgtgcacctttaaggacagtatcctggttgatgaggaagaggagcgccggcaggataggcaagacctggcagctggaatcatgaggccagaagaataccgggcgaagtggtacggcgagacgttggaggaggcagctaagaacctgccggaaccggcgatggtagaggagtgagatagatgacgcctgatgaattggagaagctgccgaagccattggagcgcaccatgacagcgctggagttgtcaatcatggccgagatcgtagagcggattaaggaggcagcgcagatcacaccggttactgactggctgatcactcggctcattgcaattgggaatagcaaggtcatgatcaagaagatcataggagaggctatcaagacagccgagatgcagattgatgagatctacaggcaggcagccagatccgattacgtccgtaaccgggaaatctacgaggccgtcggccgggactatctaccctacgaggataataattggctacaacaggccgtagaggccgccaggcggcagacgaaagacagtctaaggccgatggaaaatattactcagactacagggtttaacgttcagatggggcatggaaagaaggtattcacgccgctctctgagtatttagaacgcagcttagacaaggccatgctggggatcacaaccggggccaagacatacagtcaggccatcggcgaggtgattgatgagatgacggccagcgggatccgcactgtggactatgcatctggcaagtctgaccggatcgaggtggcagccagacgggcagtgatgaccggagtggcccagatgacgaagcaggtaagcgataagaatgcggaggaacttggaacggatcactgggaggtggactggcatatgggagccaggaacactggtaccggatacctcaatcaccaaagctggcagggcaaagtatacagtaccgaggagattcggaccatctgcggagagggcgagatgctgggattcgccggaatcaactgctatcacatcaagtccccgtttcttccggggatcagcaagcgcaaatacacggatgagtggctggcggagcagaaccggaaggagaacgagaagaagccttaccgcggccgcgagtacgacacatacggcgccctgcaataccaacgccgattggagcgcacgatccggaagcagaagcaggacgttgagttgttgaagacggccggagcagacaagaaggatattatggaagccaggagccggctgaggcttacggataagcactatgtggatttttcaaaacagtttgatcttccgcaacaacgggaacgcttgcgaattgcgaacaaaggtactgaaggtgagcatggaatcacatctaagaagggagcttctggatctgaaagcagggtagacttagaatatataaactcctcagaatataaagcaaaatttagccagatcacagataatgcaaaagtgaatgagagtatatatcagagagctaaggcaatgctgacacatcgaagtgggaccgataaagaagacatgtaccttttagataggaatgatggaaagattattggtctgcaaaccggagggaaaaccgattatgaagttgagtacaataaaagcttaacagatgcggtaaataatagtaagccatattctttaattagtatacacaaccattcaacaaaccggccgccgacaggaaaggattttacatctaatggtctacataggtatgcgctgggcgtcgtggcctgtcatgacggaaccgtatatacctataaggttggaacgcgtatattcacatcaggattatttgatggaagggttgaaaaatatatgaagacgccatataatatgagtgagatggacgcacatttgagagtcttagaagaattcgtgaatgaatatggtatagaatggaaggtgattacttgaaaaaaggaaatagtttcagttactatgacggcccggtgaaagacagcggacgaacgttagaagagattgaagaagcaatcgagaaagaaaaagaaagatgcgacggaatgacgtcgtggagcgaagcattcgaagaataaataccaccagtcaataaatggcagatggtattttgtttgttgcgatatcgcaacagaaagagataagcacgcagggaaatcctgggtgttatttttatactcaaaattgcccggaacggcgtaaaactaccaacgcatgggaagcaaccccgtataaaagcgtagcgagaaaggagcagtatgaaacgtaaatttttagaagacatgggcctgacaaaagaacaggtagacagcattatggctgagaatggcaatgatatcgaggcggccaaaggggatctggaacaggtcaagacagaactggagcagacgaagactcagcttcaggaagccaatacaacgattgacggctttaaggattatgaccaggtaaaaaaacaggtcgaggagtataagacaaaatatgagcagtcaaaggcagagtatgaaacaaagattgcagatatgcaatttggtacgtccttggaggccgctatcactgcagctggaggaagaaatgcgaaagcggtcaaggctctgcttgatgtcgaagcattaaaggtcagtaaagatcagaccgcagatataaaggcggccatcgaggcgtgccagaaggataacagctatctttttggagccaatgaacctataaacaatccggttggtccaacaaatggtcctgcaattgggattacaaaagaacagtttaagacaatggggtataaagaacgcttagaattaaagcagagcaaccccgaaaaatatgcagaaatgaaaggagataattaactatgccaggtataatttttggaataccatttgatgatgaattatttttggatatgtggaatgaggctccggatccatattacaccgctatgatccagtcgggcgcggttgtagaggattcgacgattgcgggaatgatccagaaccacggaaatatttatacaatccctttttacaacaccctggagggagaagacctgaactacgacggccagacggatatcaccgttgaagaaataggtggcggttcccagacgggagttgtttatggtcgtgcgaaagggttctttgctcgaaactttacggcagaactttccggttctgatccgatggggcacattgttgcatctgttgccaggtattggcagaagcgtcgtcagatgcgcttgattggtatctctgacgcaatattcggtattacaggagcaagcggacacgcaaaaaagtgggcggatagccataccctggaactgacatctaccactgcagaagcaaggaaaatcagagagactgatcttaatgaccttgcgacagaggcgtgcggagatcacaaagaccagtttgggcttgtgattatgcattccaatgtagcgaaaactcttgaaaatttacagcttctggagttttggaaacagactgatgccaatggaatccagcggcctatggcgctgggatctgctaatgggtatacggttattgtggatgatggcgttccagtggagaaagttggcggagatggagcaaacaaagatctgtcgaagtacacgacatacttattcggaaatggagttatccgtactgcccgcggcagggttgatgttccggtggagacggtgagggaagcaaagaagaacggcggtcaggatgaactgattacccgtatgcgtgagacgatccaccccaatggattcagctttaagattccaacgtctgggtggacagagtccccgacagatgctcagttatttgcaaaagcaaactgggatattaaatttgatccgaaggctttaccgattgccagattaatcacaaacggctaaaaaggagcgtggtgcgaatgccttatgcagctgagcaggattatcagaatgaatatcttatgggacgtaagccggtcattcgcaccggctttgattattacgcacggcaggccagccaggtgattgatgtgtataccttcgggcggctgaaaacccttctggaagtgcctgagccggtccgcctatgctgctgtgaactggctgaagtaatctgccagcaggagaagcggaaccgggaagctgccgggaagacatcggagaaggtagggacctattcggtctctttctcttctgcggcggaggccagacaggcagctgaccgggagcagcggggtatcgtcatgaaatggctggctgacactggcctgtgttatcagggggtgtgatatgtatacgaatgctgatgttacactgtatctgtactcgaagtgtggaaagcaggattcctacaggcgaatatttgtggaagacgtgttctgggacaatgtgaagcaatccaatgtcctgaaaaccggccagcgggattctgactcggtgctgctggtgatcccgcttgagagcctgttcgagccgatccgttttactgccgggaaggatctggctgtgaaaggccagtgcaatcacatgattgactgtagcagccagaagagtatgtctgagtcgctgcaggaactgaagcagtgccatggctgcgtgacggtcatgacggtagatgagaaattgtacggcagtgaatcagcgcagcattatgagctgtcctgcaagtaggaggtgtgctgtgaaggtagaacttgaaatacagccgatagaagtgcttcttgagaagcacggccttcagcctggcggtccagtccagaaagtgattgacagtgaggctatgagatacatgagtccttatatgccgcggcgccaggccggtaatcttgaacacatgatgatcatggctacagtgactggttcgggagagattaatacaccagggccatatgcgcattatttgcacgaaggtatcctgtacgtgtcaccgacgacgagaagctcttgggcgaaggaaaatgagatcaaggtaccaacggaaaaggaacttaaatacactggtgccccaatgcggggaaagaagtggttcgaccggatgaaagcagatcatagagatgatattttagaggcggcacaggccagggtggacagaggggggaagatatgacaatcatagactttttacgccagaagttgacggagtacccgaagatatcggaatttatggccggtgcggatatccacattgattttacagatccggatcctacgaattacggcttgtccagtaccggagatagcctgatccgggaggatgttttaggtaaccagatccggcagcataattttgtcatgtacgcggtagctcagtcatttaccgactataaccggctggcgaacagcaactttttgcttgagctggcctactggctggagcgactgccggaagaggacggtatcagcgttgaggtcgataatcaagcgatgataggcatatttttaaaagcgacctctgcaaatgctatggctatgcagcctatgacggaagatattaacgatggtgtgctgtaccagatacagatatacgcccaatacaaaatagaaagtgaggaattttaaatgccagaagcaacaggaaaaatcaaaagaaaattcatggctcattatattaatgcagctcttccgtcggcttcacaggcggcttatgagcgccttggaaaagatttggaagaatacaacgttgagatgaatgccaacattgagacaaagaataacattatgggtgagacaagtgttaatctggatagttaccagccgcaggccagcgtagaaccatattatgcagaagctggtagtcagctgtttacacgtctccagggaattattgatgagcggcagatacttgatgatctcaagactgatgtggtagaagtccacctgtgggagagtgcagtttcaggagcatacacagcctataaagaggaggctatcattgaagtgagtagttatggcggagattataccggctaccagatcccgtttaacctgcattataccggagtcaggacaaaaggaacgttcaatatttctacaaaaacttttgctgctgagagttcagggtctagtgaataaggaggaaaaacatgcagagtattaatttttctgataaccttaagtctttttcgattaatggagatgagaaccgggtaattcgtttcaatccggctgaccctaatattcttgttcgggccgatgcggcacagaagagaataacggaaaagcaaagtcagatagaatctgttaagttgatgcctgatggtgcaccagttgaaaatccaacagagcaggtcagaaggcttctgaaagagtttgatgatctgattcgcgatgagatcaattatattttcaattccgatgtatacgatactgtatttgcagggcagtccccgttgtgtattgtaggagaaaagaaagaatttttatttgaagcatttttgaaagcggcgatgcctatcattcgggaaggtgtcgacgaattcaacgttggaagtcagcaccgcatcgagaaatataccagggagtacagcaaatgatcggccggctgccgacgaccctggaggtagccgggaagaaaatggagattcgaaccgatttccgtgacattttggtaattatgcaggcttttaatgatcctgaacttcttccagaagagaaatacgaggtaatgcttgaaatattgtttatgactccggaagagataccagaaagcgcatatccggaggcagttcgtcaggcattatggttcctcgactgcggtcaggaagcagatgacaagaagccatctcgtaaggtaatggattgggagcaggacgaaccaattttatttcctgcaatcaataaggtggccggccgtgaggtccgtgcagcagaatatatgcattggtggacctttatggggtactttatggagattgacgacggaaccttttctatggtcctcggtatacgacagaaacgggcaaggggaaagaaactggagaaatgggaacaggaattttatcaggcgaataaagccatgtgcgacattaaaacgaagtataccgcagaagaacaggaagaaattgattattggaataagctattgggataggcgccgtatggcgtcttattttatgcccggaagtgaggtgagagcatggcggctgatggaagcttaaaatttgacacaaaggttaatacagaaggcttcgatgctggaatgagtacgctaacaaaagcagttgaaaggctttcaggattaatcgaagacttgtctaaaaaaatggatggaggatttaccggagcaggtaacacggccgcctccaccgcgaaagatattgataccgtcgcggagtcagcgaagaaggcacgagaagaagtagaacgcctgaacaaagaaaaggctgcaacatttacaggaacgatcacaaacaataacgcttcgccttcttccattccggatgacggaaaacgatatgatatttatggtaacgatgttgacgaaataattgccagaaataaggctattgaagaatcggccagagaggccgccgctgcggagaataaggcttttgaagaagcgaaacaggggccgaccatgttacagaacacactggaaatcctcaagcggacaatatcagacataccaactattgcatcgtcaacaggccatgtaattatgggggcgtttgattctggaaatcaaagtgtaatagcgctggtggataagattgacctgttgaaggagcatctgtattctcttgagaaatcaggatcttatttcggagatcctgaatatgataagacctatggagaattgcagaaagcaatagtcgcactgaattcttataagaaggaactggaagggactggaaccgttcagaagaaggtagattcatcaggcaaaaaaatgaataaaacgctggctgctacaaataagacagcaatcccgcttaccaaaagtattttaaagttatccaatatgtttaagctgatgctgatccgtatggcaatgcgaacggccataaaggcagctaaagagggattcgaaaatctgacccagtattcagatgagacgaacaaaagtatttccatgctcgtttctgccaacacccgactgaaaaacagttttgctacagcatttgctccagctcttgaagcagcagccccagcgttaaaggaaatgattgatcttctgtcagtgggggcaacctacgcgggacagcttgtagcagcattaactggaaaagcaacatttgtgaaggctgtagatgttgaggaaaattatggagaggcattaaaagacagtaattcggaactgaaaaagaaggagaaactgaatcaaaagttggctttttcctttgacgatctgatccaggcacagaaaaaatcagaagatggctatataggcccgacaccggatcagatgtttgaaacggtggagatcgagaatgacattaaagattttgcagctgtcgtaaagggagtcttttcagatttgtttgacccgttgaaacaatcatggatggagaatggtccagaagtaaatgaggctgtccatgcggctctcagcagcatgaaaaacctcgcgttggacgtcggagcatcatttttacaggtgtggaagaatgagggctacggacagaaaataacagatgatctgctgattacgttcgcaaacctcgcatttacagcagctaatctgtgcgatcagttggataaagcctggactagtggcgatctgggcgtgtcaattatgcgtcacttgggggatctggtgcttgaggtgactggatttttccgcgatgcatctggagaaataagagattggtcagcaacgcttgatttcgcgccattgcttaaatcgtttgatgaggtactggtgagcttaagaccaatcgtaagtaaaataggtgatgtcttgctttggctcctgaaagatattcttctcccgatcgcaaaatgggggattgaaaatggtattccggcggcgtttgatctgatttcggcggcattgaaggttttaaacagtatattagatgcattgaaaccgttggcaatgtggttgtggaaagacttcttgcagccgtttggtgaatggactggaaaaataattatagaagcattgaaaaaagttacagaatggcttacaaagttttctgactggatatcagaacataaacaactgatagaagatgtaacaatcgttgtgcttggattttttgcggcatttgcatttgaaagctttgtctcgggtgtaggaaatatgctaagcgttcttccaaacttaattggggtactcgggagccttgtaggtaaacttgatccccttacactcttgttgggattggttattagccttgctgcttatgttgctaccgcatgggacgatatgacaccggatgagaagcttgcatcaaaaattttagcggttgcgggggcaatcggactaattgtagctgaaatcggacttctactccatgacccattaatgctaggcataggagtagcgatagctgcaatagccggaattgcaatagccggaattgcttcatcggcaaagagtcgggcgggtgcttattcaagcggatcatacagcccatataatacttatagccttggagatgtgagcagttacagaatgccgcgcctcgcaacaggtacggtggttccgcctcgcgctggggagtttgcggcaatccttggagacaataaccgggaaactgaagttgtttctcctttgtcaactatagaacaggctcttgataatgtcatggcgaagtatatgggagaaggaggaaacaggcggcctatgcagattgatttaatcatcaatggccagcggtttgcacgggcagtctatgaggcgaataaccaggaacggcagcgtgtcggcgtaagaatgataacggagggatagataatatgtcagaaaatgttttttcaatagacggcgtagatctccggttgaatgtcacaaagctagatcgtgagttttctgttacggacaccgaaaactccggccgtctgaaaaactatgaaatgtaccgggagatagccgggactttttacaactacaccatggagattgagccgatcacacagtatcgtgaagattatgataccttttaccagatgatatcagctccggaaacaaagcatcgactggtagtcccatacgcgcagaaaacgcttgagtttgaggcttacgtgaccaaaggtaaagacagcctgcagcgccgtggagataaaaatctatggcatggcttgtcagtgtattttgtagccatgtcaccacaaaggaggccgtgatatgtttttgaagcagtcaatccggtctgatgcgacggatcagagtggtattaaaatcgtttacgatgatgtggcaccgtatgcaaaagaaaacagtaatccgcaggtaattgatgcaggactatgccccggagcagatacgtttccggggccggaggtgtatccggcgcctacagttatcagaaatacttttcccgatcttaaacgcgatgacttaaaatatcctggatatgcgttatgtctgccccggtttgcgctactcaatggcgactatataaactttccggatgacgcgcaggggtatggttttatcagtgatgagatatcagattccaatggacgttttgaatatacaatgactcaggaaccgacattgccgggtgagtatccatcaatatttttatacccttctccgggcctggaaaaggagatcaaaacgccgacacttgagatcacatttaaccgtaaatttacgagtgttggtctcctgcttacttttaacgatatgtcaggagattttgcgagccggataaatgtcaaatggtactctggcgaacagctactttcggacttgaattttgaaccgaacgaaacaaagtatttttgcagtaattatgtgcagctttatgaccgcattattattaccttcatggagacgtcaaaaccgtgccggccagttttcctgacacggattgattatgggatttacagggattttatgggggatgaaattaaggagatcaactgcttgcaggagattaacgcaatttctgagagcataagcgttaatactatggattttacagtgaagacaaagtcttctgtaccgtttgatttgcagaaaaaacagaaattgtcattatatttcaatggcggcctgatcggtaatttttatcttaaaaacggtgcccgcaagagtaaaacagactactacatggatacgcacgatgctgtcggccttttagacggcaacgaattccctggaggaatttattccgggcagttggtaccagacgtaatatctcagatatttgacggcgaggattttaattacctgcttgatgagacgtttaacaatatcactttatcagggtatatcccgtatacaacaaaacgggccgccctaatgcaaatagcctttgcaatcggtgctgtggttgatacgagcaactatgacggagtgattatctatccaaagcagaccaaaaatactggagagtttgacaaagtatttgagggtttgacgctggaccatagcgacgtggttaccgggatccgattaaccggccatagctatcagcgctcggatgagtcagaagagttatataatgatgagctgtccggcactgtacaggtcactttttcggaggcccatcactctttgactatctctggaggagtgatttcgcagtccggtgataattacgccatcatcaaagggactggcggagctgtagtgcttaccggaaaaaagtatcatcattatacgtttatgatctctcgtgagaatccaaatatcttttttaataaaaacattaaggaagtgaaggaggccacgctaatcaacaaggataatgcacagcaggcgcttgatcgagtctatgagtattatcagcgggctgaaaatgtaacttgtgaggttatcttagaggataaaatgatcggccaggttgtaggaatagatacagattacgacggcgtgaaggtaggaacgatagagcgaatcaattatagcgggattgcccgcgcaatcaaagcagaggtgacgatacatgagtgatattttggattgcttaatatttgaccgcgtacaggctgacatagatgctatgactgacaaggcatatattgattatcaggaccttaaccgagttgaggatgctattaagtgggtgtcgcatgtgctcaattgctatggatatcgtaatacgattattgagggggctatctggcagccagaggatcgccgtacagaaagcgaaatggaacggatcaggaagaaccttattgcaatccgatcagccttttacacgccgcccagcacgcctcagacaccggaaagaattacatacacgtctatctatcaggcaaattttattgaaaagatcatttatgatattggaatattggttgagaatttaatacccagcataccacatctggaatttaaacttggctgccgcggtatcggaaacaggagtgtgagcctttgaagaaactacgaacaaattataagaatgacaaatatacagggaagcgcctgtaccgagtcaccaatgtctcagcggatacggttaatcttgatgatataacgatatacgccgaagagggagacattttttcggcggacgatatcaacgaaacaaatgctgctgtaaatgaattatacgaggagtatgcggaggggatcagccgggcgaaccggtatgttgaaattaatcttccagtatctggttggtctgcgacggctccttacattcagacggtatctgtgccaggtatgctggcaagcgacagacctgtaccggggctggtgtatccagacaatctcactgaggcattgcaggcccagattgacaagagcgccaatatgataacaacaattgagacgctggacagcaaggtgaaagtaacctgtagatttaagaagcctgtaattgccctgcgcctggggctgaaaggagtgtaggccatggcaatattaccattatttttccggggacaaagcgtggatttcagcgggcttaccgcagtggaaaatctggtccgcaaagggaaaaaatttatcggtcggggatcctcggacatccgaaccgggaacctggaggagaaaaatgcaacaagctataagctgccgatcaatggtacgtataacataccagctgggatccacaatgctgaggacacagtggatcaggagattgataccatggacggacagattgtaacacctggtgccggaccggtagtaattcaatgcgcaggcaagtacatgaccggcgatataattgtttacgctgtggaaaaccttacagccgagaacatcaaatttggagaagtagttggcgaaggtgaaggagctgttactggaacatgtcagggatttttcgattaatatggagggcaatcagaatgatactacctattagaaaagtggggggaggccctaatatatcagagttgacggcagacccgggggatgtattggctgccgagaaatttataggtaccggaagcgaggagccgcaggtgggaaaaatcgtacagcgcggtagtcctgaatatgccctgccgattaatggcgtacagaagcttccgcctggaaattataccggggggaaagtgaagcaaactatcgaaactatggcggctcagagtatcggaccaggcgctcgtatgatcacaatcccaacagcgggtaagtacatgactggagatattacaattcgggcagtgaaaaatctttccacatcagtaataaaaaaagggcagtacgtcggcggtgtaggacctggaacctgggagggatatgtaaacaaggatcctaaagtaccatattattatggtgcttttaatggaatacaaagtataacagcctttaaacacctattatgggataatgttggaactgtatcattggaacgagatcatatcaaagtctatgtacgaaataatacatattatacagcggttgtattcaatgaacccatagacctgacaaatttaaacaggttgattgtaagattggaatacagcggatcggcacttgataacatcgaattattccggaataaggtaacagattatatttttgataacgaaaaatccagcagcctgaaaagaaaccctaacctgggagataaagtagccggaatgaatacatcaggaaccgggggggattatactcttaatctaagcagtgtgagcggaactgcgtatctctacttactgtttatttcgcctgcggtaacttcgaaaattagaatggttaaatttgaataggaggaaactatggcagtaagaacagtacaggcaattatcaacggtgttacgactaccctgacgctgaacagcagcacagggaagtgggaagccacggtcacagcgccgtcaacatcgtcttacaacaataacgacgggcactattacccggtgacgattaaggccacagatgaggccgggaatgcgactacaaagaacgatacagatgtgacactgggcggcagcctgcgtctccgcgttaaggagaaagtggctccggttatcctaattacatatccgacagccagtgcgctgatcgtcaataataagccggcgatccgctggaaagttacggataatgactctggtgttaatcctgatagcatcaaaatcacgattgatacaggggaggctgttaccgcagggattgtaaagacaccgattacgggtggatacgattgtacttatacacctacggcggccctggctgacggcagccataccattaaggttgacgcagctgacaacgatggcaatgccgcgacgcagaagagcgtaacatttaagattgataccgtaccgccgactcttaacgtgacggctccggttaatggtctgatcaccaataaggccgcctgcaccgtaacaggtacaaccaatgatatcacctcaagcccggttactgtgacagttaaacttaacagcggcacagcagaggcggttccggttggcgcagatggatcgttcagcaaggcgttgacactggctgccggaagcaacacaatcacggttgtggcaacggacagcgcgggcaagtctacgacggtggtcaggacagtaactctcgataccgtggctccgacgatcagggccgtaacgctcacacctaatccggtagatgccggtaagacctatgtaatcagcgtggaggttacagactaaggaggcgataccatggcagtagcgcgagtatttggccgcgtagatggtgcagaggtggttatggagcagacacagggggacatatggtcagtaccggtacccctggactatgacggtgagtatgtagtggagataatcgcggaggacggcgccggtaaccagtcatatatggctaagatgctgttttgtgtggactcctccgggctatgcgtgcaagtacttccgatcccgtattttgccgagctccttgacagcatataccacgctgatgtgctcccggcattattttccgcggagctgttagaaccgtgttgccagagtgggggggggtaaatatgcagaaaattatatttgatattggagaacaccgccacgtccgtttaaaaatccatgcagcacaggacgcaccatttcgtataaagtccgcatcatgggagctgttgcgaggaaataccctggaagcttccggggaatgcgagatagatgaacatattattgatgcatatatcgaggccccgcccggtaaaacgtcttatattcttcgcgttatctataagatcaatgacgagactctggtggagcaactggatttggtggtggtgtgatggcagatttgtatatacagtcagtcaagattacaccaaatccagtgacaacgaaggcacaatttaagatagaggttgagatatataccttattccctgcggcggatttatatccggcgcttgatttatatcccggagaagatttgttcggactcttcccgcaggaggagatattccctgggaccaatgtatacccaatagaaggaggaatgtcagaatgacaataagtaattttgtggcctacgtaaagcaggcatggaaaaacaaaccggataccagcacgccgctgtctgcggccaggctcacgcatctggaagatggtatcaagggcaacagtgacgccatcgagaagatagcggcggcggtggtgagccagattgtgaatgatcccaataagatagccagtatggcctcgctgtatagtgttaatcaggccgttactcagctaaatagtgatttaggtgaggttacaaatggaaatactcaactcaaatccaaattatatactggttcggccgcgtcgggaatcgtcgttaccagccggaataatcccatatcgctagaaaatgtcagcggacagattcttgcccatattgatagtaatcaggttgggtatgtatcgacatgtcccactaatccggtcacttttacgattgctaatggccgtgtaaaaatgtatgtggataataatctcataggataccttactaccaccacaacttaaatgatcatttgttgccgatggcgacccagattagtgtgatctccttattcgtccaatgttgcccggctacgtttacggacactgaaaatccggtagtattaactccgcgtacactggccgagcattgctcatatgaatacgctaccataggtattacacagatatcggtatctgcaaaggtataaccaaatggtatattacaatttccattctcgtctgtggttaccacgcaatatatgttccacgtaatttttttgttaccaataaccattgccgttaaatcactattttacttagtaacgaacatgatcggtggacgatataaggccctgccctttacaatgaacagtgaaggagggcttatttatatggtagaaaagatactcgaaaatgtagtcaatgagatggcaccgcatctcagccaagagcagctggagcacctaagcaacgtattatacgtcaatttccatggcctcgaggtccaggaacaatgcacggagctggcggccaccggcgaagacggtgacgaggcaaagatccggatgtttgtggcgagtaaaaaggcggtaaaccggcagaacaatacgcttaagcaatacacccgggagatctgcaatatgctggatttcctggggaagcgcctggaggatatcaccggcatggatctgcggtattattacggtgtgatgagggagcgccgagggattaagatgtcaacgatgcagacacggctccattacctgtccagcttctgggactttatgatcacagaggatctggtgagcagcaatccagttaaaaaggtaggtctattaaagatcgagaagacaatcaaaaagccgttctcggcagcagagatggaagcgctgcggaccagctgcagcgagctgcgggatcgagcgctggtagaatttctatatagtaccggcgtcagggtttcggaactggtatcgcttaacgtgggagatattgagatggggaaacaagaacttattgtatatggtaagggtagcaaggagagaaagacatatttgacagatggagctaagttctatctgcgccgatatcttaggacgcgctgtgaaaatgaaggaatgaccatggaggagttacagggccggccgttgttcgcgacgctggaccggccgcatggccgcctgacggtagccggggtacagtatatgctccgccagttggggcggagagccggagttgagggagtgcacccacatcgattccgtcggacgatcgcaacggatcttttatcccgtggaatgccgatcgagcaggtcaaggagttcctgggacacgagaagctagacacgacaatgatctattgtaccgttaagaccgaaagcgtccaggcatcgcatagaaaatacgcttaaaaactgtatattatatgctgatttaagcgggcttttggggtcgctctattaagtttaccctgatggccatgcaagcgcgggaaacgggcaaaatgaaggtgatatgagcactgaatgatatagtgatttagctgtggcaatcggcgagacatcaaatataacgagcgccagtttcactggcaagatcatttggcaaaatttaggaagactaacgacactgagttttgagcttacgacaaaaaaagaacttgcttctggggctacatacgagcttatctcgattgcggaaggtatacccagtaaaaaggccaattgtgtgctgacgacatctgatggtaaaccgtactactgctattcgtcgcctgatggcaagttttatgttgcaaactataccggtgcagctatccctgccaacaaggtattatacggtcaaatagcctttatttccgcgtaaaaatgatcaatttaccgttactggtattgaccatataatttcccattgtgctgttttgggattataccttaccagattgacaccattattataaaattccagcgacgattttgatccatcgttatgtttaaaaacaaaatatcttttttcgccgtcagtgccgaattccataccattaacgtttccaacgatagctaaatcactatatcatttagtcaacaccataaaaatggaaaattcaggcccacattgggccttttattatacataaaaattcagaaaggaagtaaaaagtcatggaaaaaattaaaattggaactcaggaggcactttttgagatcgagtcgatccgtccggtatcggaaaatgtcatgcagcttgtatttcctgataccatgccatctgtatggggggatattaccatctatacggacgacggaacagaagctactacgatcacaggatatgagactctgtatcgtgacgagggacagacagtgtatctcagtaatgatggaagtgtctatacagcgcctgagacgccagagggaccgggagaaccgccggagccatatattccaacactggaggagctgcaggccgcaaaacgccgggagatatccgtagcttgccagcagattatctatcagggcgtgaatgttccactatcagatggcagtaccgatcatttctcgttgacgatcgaggaccagcttaatcttttcggtaagcagatccaggtaacctctggtgctgctcaaattgagtatcatgccgacggacagccatgccgctattacactgcagcagatatgcaggccattatcacagcggccatgtggcacgtaagctaccacacgacctattgcaatgcacttaatatgtggattgccggctgccagaccgcggaagaggtacaggacatctcttatggcgctgacgtgcctgttgagtatcagagcgaggtactgcaggcatatctggtagatattgcggcgcaggctggaggaggaaccagacatgcgtaagtacctggctctaatggccaccggcggcttgctgtacgtgattctggaactaacatggcgcggccggagccactggactatgtttttattgggcggtatctgtttcgcggccctcggcctgatcaacgagatcctgccatggagcatggcattgtggaagcagatcctgatcggcactggtatcatcacagcactggaattcctgaccggttgtgtggtcaacctgtgtcttggctggaacatatgggattacagtcacctgcctggtaacatactcggtcagatctgcccacagtattgccttctgtggctgtcggtaagcctggccgggatcgtcctggacgactggctgcggtactggtggtggggtgaggagaggccgaagtataaaatgatatagaagaaagtgaggagatgagctatgaaatttatcgataaatataatgcagttgtaggagcagcagtaaccgtgttgacagcgatcttcggagtgtattggtacgtctttgctggatatttactttgtaatgcactggactacataacaggctgggcaaaggccaggaagacgcataaggagtcgagcagtatcgggattgtaggaattgttaagaaggtaggatactggattatcgtcctggtggctttcatgattccggaactgtttattcatctgggacaggacttactgggggtcaatttaagtttcctggcactgctggggtggtttactctggcgacgcttctgattaatgagatccgcagtatcttagagaatctggtggagtatggcatcaatgttcctgatttcctgattaagggtttagcgatcacagaaaagcttatcagcgccggagcagatacgggtgagaaatagtttcgacggtcgaaactcccggccggcagggtgagagccggagctgttgcgatatcgcaatgaggtatgatattataacttgtagcgttacaagtttttgggcttggaggtcctgggctctttttagattggaggctaactatgttacctattacaaaacagatcaaacagatcaattgctatgcaagccagaatcacccaaagtacatcgtaatccatgagactgataatttcaacaaaggtgccggagcagaagcacattcccgcgcgcataacaaaggcaatctgtctacctcagtccattattacgttgatgatgtagcaatctaccagacactcaaccatacagacggtgcatgggcggtcggcaagcagtacggcacgccgctggtggccggagtcaataacaacaacacgatcaacatcgagatctgcgttaatccggacagcaactatgataaagcccggcttaactgtgtggatctggtacggcatctgatgcaggagactgaaatccctgccgatcacgtgatccggcactacgatgcgaaacgcaaatggtgcccgcgcaagatgatggacagcccagagttatggacggacttctgcctgcgggtccgcggccaggtggacgaggtgaagagcttcgaggacggagccgggaactggcattttacgattaatggcgagttgcagaagacgcgctgggtaaaatataagaataagtggttctacgtggacgattccgggaacatggtaaccggttatgcggttatcggaggcctggtctatatgcttaacccatcaaaggctgatatggcgacatacggggcgctgatggtaacgaacaaccttgcacaaggtaatcttgaggtgcagtgggtggaatagcaaacaacagaataatgatgtgactgaagctctgggaggaatcccggggctttttaaattgaaaggaaggtatattttatgaaactgagacttgttaaacagggagatttcttgggaacaaaatgtgatttttacgtaaatgaaacaggcgatatcttcatgagcagaacgcagatcggatatgcgcttaaatacaagaatccaagtaaaggtattgaaaacgtccataatagaaataacaaaagaatggacagatttagtgtaatcgtaagggggtctcaaattgagggagggtccaggcatatagaccctaattctgacatgtatctgtatgtagaacgaggaatttatgaaatatgtcgtagatcagcacagccaatagcagacgatttcaacgactgggtttacgatacgatcctgtctatcaaaaagaacggctactacatcgccactgaaaaagatgcaaagtggctgggaatccgtcaggagaccaaagaggtacgcaaggccgaaacagatcagattaagctctttgtagagtacgcgagggcacaggggagccagcacgctgatcggtactatgtgtcactgaccaaactcataaaccgcagattgggcatagagagcggcggaagggacaaggcagaccagaggacgctgatgcacttaaaatcactggaaacggtggtggagctgcatctggctacgctgatggcggaggggctgccatacaaggagatatatcagggcgtaaaaaagtttattgaagcgctgtaggaatctcacggctgaaaattcagccgccagtttgagtggtaagaaaagggcggtccgtttgggccgccttacttcatataagggcaataatatcgaaatataaaaccccggattgctccggggtcaggcccatcgtgttacgcattggttaagaggcttgatgggatctgttgatctaaatatgataaggaatgataaccgccaaatggcggtccctgcggccgacgacattacatgtcgcttaaacgttaattcggttatgcaggtatacagcatatctctatctgcactcttagtatatgccaaatactttaaaatgtcaaccggacagaaaaatccagacactgtaaagaatgtctggacctctctgagaaaatataggttgttggagaatcgtaaaacttccattcgcatgtttagtatagcacgttaacaggtgcttggcaaggggaaaaggggaagcatacagctgattatgtgaagttaaggtgtactgtttgaataaaaacattacgaaaatcgaaaaagttgatttttggagaagaaaggtattgccagaactctctggaaatgatataatcaggttgctcgtattatatatcttatatctttctggcacgcccagtaagagtattcatgcaaagccgctcagtatccccatacactgggcggtttttgtgcgtaattcatgtataggtgaccagtagtaggctacatctaaaatgatatatacgcgctataatcattgcgtttttgcttttctaatttgcggcttagctgtattggcaggccgcattttgtgtaaaattacaataaagtataaaatggtgttgatttatttgtatatagtgatataattcttttgtcaacccttctcttaggtcgtctaggtatatcccaatccccatacctggacgacttttatatgtgcatcgtacaacgttataccagccgacttctggtgtctggtatatgctgtgtcaaaaaccacatggcggtaatatccatgttgaggagtatctcagccatctcgcgagtctcctgatactttgcgtttctggcagcctgggcgtgccgctggtaggtctcaattatctcaaaaaataattcatctgttcggttcatttttcccccttctctccctcataattatattttcgcactgtcagagtatacagccagaggccttaatgcgttatctgtttttacaataaggaggcccagatggagaaatcagtgcttccatgcgctatctgtcccagcgttatgcgatgccgtataaagagtgtaaagggctcttaaccgatatcggtacggaggagcttgctcatatggaaataatcgctgccattgttcatcagctcaccagaaacttaacaccggagcagattgtggaatctggctttgggccttattacattgatcataccacaggaatctggccgcaggctgcaggcggaattccgtttaatgcctgcgagttccaatcgaagggcgatccgattaccgatctggtggaggatatggcggcagaacagaaggcccggagtacctacgacaatattctgcgcgttgtgactgatccggaggtctgtgacccgatccgttacttaagggaaagggaagtggtgcatttccagagatttggagaggcgctgcggattacccaggataatctggacagtaagaatttttatgcttttaatcccagctttgatgtaaagagtaattgctgataaaaagggaggggccggcaagagggggattcttgccggccagagtatgaaaaaaagttttgtttggtttttccttgttacatgtattactatacatgggatatgtgaagaaattttgatgaaagtatgaaaaaaatgtgtacatttcatttgggacaaaggatcaagatgttgtgtatacagtatttcagcctgttatatgttgtgacttcacgggaaatctggtatatttgtaagggtaattgaaacgtgaggaaagaggggacaggcatgattttagtagtaaaacgtgatggagaaatcgtagagtttcatctggaaaagatttccgaagccataaggaaggcatttaaggctacgggaaaattttatacggaagatattgtggagctgttgtcaatcagagtgacgtctgattttcaggggaagatgcagggagaccggattgcggtggaggacattcaggacagtgtggagaaggtgctggaagaatccggctatacggatgtggcgaaggcgtacatattatatagaaagcagcgggagaaaatcagaaatctcggcaggacaacgctggattataaagatgtagtggataactacgtgaaggtggaggactggcgggtgaaggaaaactccacagttacatattctgtgggaggcctgattttaaacaactcgggagcggttacgaccaattactggctgacggaaatctatgataaggaaatcgccgaggcctatgtaaacggcgatatccatattcacgatctgtccatgctgaccggctacagctgcggctggtcgttaaaacggcttttaatggatggactcggcggaatcaccggaaagattacggcgtctccggcaaagcatctggctacgctctgcaatcagatggtcaattttctggggattatgcagaatgaatgggcggcatcccagtcattttcttcttttgatacgtatctggcgccctttgtcaaggcggacaacctttcctatgaccgggtgaaaaaatgcatggaggcatttgttttcggcgtcaatacaccgagcagatggggaacgcaggcaccattttcccatatttccctggatttgatgattccggaggacatggcggagcaaaaggccattgtgggcggaaaggagatggagttcacctatggggaatgccagaaggaactggatatggtggaccgggcatttctggagaccatgctggagggcgacgccagcggactgggttttcagtaccctatcccatcctatggactgactccggattttgactggtccgataatgaacgaaaccggctcttgttttccctggcttcccactacggtacgccgtattttacaaattacgtccgcagtggtctgacacctggtgacgtgaggatttcctatgagggggtcactccggatttccataagctgcgcagcaaagcgggcggctttttcggatttggggagcacacgggatcgatcggcgtggttaccattaatttaccgagaattgcgtatcagtcaaaggacgagacggaattctacgagagactggatgagatgatggatctggcggcgcggtccctgcgaatcaaacgggaagtgatttccaatctgctgaccaatggcctctatccttacacggcctgttatctgtctgatttcagcaatcacctttcgtccatcggcgtgatcgggatgaatgaggccggcctgaatgcaccgtggctgggagagggcatggaatcggagaaaacgagggagtttgccgttgcgatgctgaatcatatgagggaacggattgtgggataccagctggaatatggagatctttacggactggaagcgacgccggcagagtcagctacctaccgttttgccatgctggataaagaaaaatatcccggaatcagaaccgcaggccatgagggggatgtgccgtattacacgaacagcacgaagctgcctgcggactacgacggcacactggaaaaggcgctggagcatcaggacaggctgcagccgctttatacggcaggaactgtattccacgtttatatggaacgtgaatttgacgactggaaaaaggcgcgtgatctgctgcacagcataaccaccggccatgatattccttattatacgctgtcgccggtttattctatctgccagtcctgcggatatctgccgggcaggcagaacgtgtgccccaaatgcggcggccgcgctgatgtttacagcaggatagccggttattacaggccggttcatgactggaacgaggggaaagcacaggagtttaaaaacaggatcatgtaccggatgtgattctgtcttccggcacaaagttctccattatgcacattcaggaactgatcgcatatgatatagtacaaacctgataaattaaaggagatcaatcatatgtgttgttgtaataatagatgtaatgtaagttgtggatgtaatagtggatgcggtggttcctggggctgcggatgcggaaatagtaattcttcctgcggatgtggatgcggaaataacaattcttcctgtggatgctgcagaaatgactgggcaaacagcaactatcgccgcggctatgcagcaggctttaatgcaggttatgagactggcttcagagatggcttctggaccggcaataataacaatgtaatgccgatttcggctcccggtacggctgctgacagcggctgcggctgtggctgccgttaatcagctgtaaaaacggatatttgctcctgagataagatctgccggcacgttatcagtgccggcggaaacaaaaaataaaaagcttttatgaaacgtgtgaatgaggcgtttcataaaagcttttttatattattaatattatagaaaagtattccccgctgaagcagccgtgctccgacagcggccgatccggtaaagaaaataatgacaaaaaaagagaagagagtttggttatattgcacattgaataattgaatacaatatgatagtctatatacaagtcattgaggttgtatacaaatttgaaagtttgaatacattttaaaaacagaccgggatgacgaaataactgaccagaccaaaaagaaataagtaaaggagaaacgaatcatgaacatggattacttaacagacaagttttcgctgaacggtaaagtagcactgatcacaggtgcttcctacggaatcggttttgcaatcgccaaaggtatggcggcagccggcgcaacgatcgtgtttaacgatatcaagcaggaattagtggataagggaattgcttcctataaagaagagggaatcgatgcacacggctacgtatgtgacgtaaccgatgaggcggctgtgaatgagatggtagcccgtatcgagagtgaagtaggcgtgattgatattctcgtgaacaatgccggtatcatcaagcgtatcccgatgtgtgacatgaccgcagagcagttcagacaggtgattgacgttgatttaaacgctccgtttattgtgtccaaggcagttattccgtctatgatcaagaagggccacggcaagattatcaacatctgctccatgatgtctgaacttggccgtgagacagtatccgcatatgcggctgcaaagggcggcttaaagatgctgaccaagaatattgcgtctgaatacggcgagttcaacattcagtgcaacggcattggacctggctacatagcgactcctcagactgcaccgttgcgtgagacccagccggatggctccagacatccgttcgatcagttcatcatttccaagacaccggcaggacgctggggagaagcggaagatcttgctgcaccggcagtattcttagcttccgatgcatctgattttatcaacggccacgttctctatgtagacggcggtatcctggcttatatcggcaagcagccgcagtaagattcactggagcggtggcagccggagattgaccgcaaagaaaggttatgctatactatgagcatccggtgtgctgcacctggtaaaaaaagaatgtatattcatgccatgattctgttttcggcagagctcatggcatgttttttagaaatgataacggagaggtgccatggaagagaagacgaaagcctataaaaaccgcggggagctcgtttttgagacgttaaagcgggagatattggacctggagctgaagccggggcagatgatcagtgagaatgagatctgcgagcgtttcggcgtttcaaggacacctgtgagggaagcggtcaggagactgcaggagcaggggttcgtcatttccgtgccctattccggcactcaggtaacgcttttaaacttaagcaatatcaagcagatgatctacatgcgtgtggcagtcgagactatggttatgcgggatttcgtggacattgcgaccccgctgtggatggaagaggtgcgctacatgatcagaaagcagcaggcgctcatccaggagaagggctttgagccggaacagttctaccgcatggacgcggagatgcacgccatatggttccgtgccacggataagatgaagctctgggacatgattcaggcgcagcagcttcactatacccggttccgcatgctggattttgtcacggaaacggattttaccagaatcatccgggaacatacggagctctttgaactgttggaaaaaaaggatattgccggcctggagcgttccctgaaggaacatctctactacagcatgaaacgtatgaaacatcagatcgatgtagaatataaagattactttgaacaggaggaatagacgatggcgaacgtatcgattaccataaaagatgaaaatggcgtggtaaaatgctccggatgcggcgaggagagggctgttctcgtttatgagggagagtactgccagggagataccataacctttgccacggatgcggtgaattgccactatgtggttcgtgtggatgataccatggacgaggctctggtctatattacgaaaccggaagtggtttatgcgattccatttgaggagaagaaggtttcctacaatccgaaatcatttaccggaggaaagcattatctgaccataagaactgcagaggcgtatgagaccggtgcataccgcaatctcgcaaagaatgtgatggaccagcacggggatccgggctgttatcctcatgtatatgcgaatgtggagaccagaggagaggctgtatttgctgcacgcaatgccattgacggcgtggtttccaacgaatcccacggcgaatggccgtatgaatcatgggggattaaccgtcaggacgatgcggagatgaccctggagttcggccgccccgtggattttgataaaattgttctcgttactagagccgattttcctcatgataactggtgggtaaaggcgacatttaccttttccgacggtacgactgaggtcgtcgatatggaaaagagcgtaaagcctcatgaatttagaatcgagaaaaagggaatcacctggctgaaactcagcaatttgattaaggcagatgatccatccccgttcccggctctgactcagatcgaggtttatggagcataacaggcgatgtcaataagcggcacacataataaggtatgcataccctgacgggacctgcataccttatttgtcaatttcttcacgatatttgaaatttcctctttcccttttctccttattcgggtaaaatggtactatgacagacaccattgaggggtggtataatgagtcataataaggaggacaacatatggaactgttgtttatggagcctgtgttcaaggaagcaatatgggggggcacgaagcttcgcgacgtgttcggctatgagattccgggagatacgacaggtgaatgctgggccgtgagcgcccacaagaatggagactgccgcattgccggcgggatgtacgacggacggctgctcagcagtctgtggaaggagaagccggagcttttcgggaattatccgggagatcagtttccgcttctcgtcaagatcattgacgcaaaggcggatttgagcattcaggtgcatccggatgatgagtatgcgaagatccatgaggacggatcgctggggaagacggagtgctggtatattctggactgtgacccgggaacggagattgtcatcggccaccatgcgggaagccatgaagagatggaggcgatgatacgcggacatcagtgggatgcatttatccgcagagttccggtgaaaaagggcgacttcttccagatcaatccgggatgcgtccatgccatcaagggaggaactctgattctcgaaacccagcagagcagtgatattacatatcgtgtttacgactacgacaggctgtctgacgggaagccgagacagctgcatgtggaacagagcatagcgaccattgaggcaccatttcaggaagcttcctgcgatacctttacggaaaagataccgggcgcggttcatacacaccttattacgtgtccattctattctgtggacaagtatgagatcgacggcgtgtttaccagggaattcagccgatattttgccaatgtcagcgtaatcagcggcaagggctgtgtaaacggaattccgctggagacgggacagcattttatcgtgccggcaggagcgggagaattgagattcgaaggaaagatgacggtgatctgttccaacccggaaacagagacccggcagaacgctgcagacctttaaatttgacgcttcgctgcttgcggcggggcttttgactgaggaagaatacagacaggaggagtaatgagatgagacttggagcattagaggcaggcggaacaaagatggtttgtgccattggcaatgaacatggtgagatttttgaacgggtttcgattccgactgaaacaccggagattacgatgccgaagctgattgattattttaaggataaggagatcgaagcactggggatcggctgcttcggcccgatcgatttaaacagaaagtcggagacttacggatatatcaccacgacaccgaagcttaaatgggccaattataatatcgtcggcgcatttaaagaggcgcttggggttccggttggatttgatacggatgtgaatggttccgcactgggagaggctacctggggcatcacaaaggggctggagaacagtgtgtactttaccataggaaccggagtcggagcaggaatcatatccaacggcaggctgcttcacggcatgcttcatccggaaggtggccacgtgctgctggcaaagcatccggaagacacctatgcgggaaaatgcccgtaccacagaaactgtctggaaggccttgctgcgggaccggctattgaagagcgctggggtaagaagggcatagagcttgcagacaggaaagaagtatgggagatggaggccttttacatcggtcaggcgatcgtagactacatcgtgatcctgtcaccgcagagaattattctcggcggaggcgtgatgcatcaggaacatatgatgccgttagtaagagaagaagtaaagcgccagttaaacggctatatccagacgaaggaactggaggatttagacagctatatcgttcttccaagtctgaatgacaatcagggaattatgggagcgttaaagcttgccatggatgaactggaactggcagaataagtggtaaaattgccaattttctcctagtgataaaggaacttcagtatgttatgatacattttgtaacagaaatgtaacaattttgtaatacataaggaggactttatcatgaggaagtatccattatttgttctggcagccgcagctgcaatgagtatcgcaagtgtaccaatgacggctcacgcagcggcctttcaggtaaccggaggtggaaatggcatgagtggttatatgacaaactgcagcgggcagaccggcaatttggcaggcatattcaatcagctgagtgcaactgctaacggcagaggcggattaggctgcggacttggccagaactatacgggcaacgggtcctgcgattacggtcagggctgtggagacaacgggttctgcggcttcggtcaggactgtggggataacggatcctgcggctttggtcagaactgtggggataacggatcctgcggctttggtcagaactgtggagacaacgagtcctgtggcttcggtcagagctgttccggtaaccggaactgcggcgggaatcagaacatgggcatgaacggacagggaatcccttttctgatgatgcgttagaacgaaacgattaaaaagaaagatgatacataacacagaaataaaaagcagataaaaagcagatattgagaatctccgcagtgcagatcggaatgcattgcggagatttttttctttctgtctggcaattcctttaaagcagagtacgacacatcccccaatctgcctattgacttttaatttccacaccgctataatccaatacgtttaaaaatataaacacataaacacatttcagggcaaaacagggaggcttggaaggatgaagcagatttgggccatatttctcagagatatcaagaacataggaaaaaatccggtggcggttatcgtggcgctgggaatcatgatactgccgtcgctgtatgcctggttcaacattgcggcgaactgggatccctacggcaatacgaaggggctccgggtggccgtcgccagcctcgataaagggacgcggatcgagcagcttgacaccactgtgaacatcggtgacatgattatttccaaccttcatgaaaatgatcagattgggtggcagtttgtggatgaggagcaggctgtggaaggtgtgaaggcggggcgctactatgcctgcgtcgtcattcccgaggatttcagcgagaagacggccagtatctttacttcaaacgtcaggaagccgacgctccagtactatgtgaatgaaaagaaaaatgccattgccacgaagatcacggataagggcgtcagcaccatccagcagcaagtgaacgaatccctgatcagcgcctcctccgaagcactgggaaaggcatttcatgtcacctatgataccgtggaagggaagaaggaagatttggcggatgagatggtggcttccatgaaggatgccagaaatgatctcgtcctgatggggagctcggtcaatgcgttaaaatccgctctgactgcgggaaaaggactcttgagcagtgtccaggcaatgctgccggattccagggagcttttagagtcggggcaggatacgggggcggaggtcagccgtctaatccgtttctcagaggatttatcggataccatgacggacagcgtggggaatgttctggatataacagacgggctgatggactcggttgacggatcgatccgggacgccattgacatgtgggaccgcgatacgaatgcggcggcaggggcgttaaacagggcttccggaattttagataaactgctgactgtgaatcagaagctttttgacctggtgaaccgcctaaaggagaatcttccggggccgggaaaggttctgggagcgatgtctgatatgataggcagccagatcgaacggcagaaaaatatgatacatatcattgatacggcggaagatgccgtattaaagacgggaaagcttccggcggatgcgagacaggagattaagaagtcgcttgaggagatgatggatcagggggctcagatcacggatcagtaccacagccaggtaaaaccggccatgacggctggtctcgacagtctctatgacagcctctcagcagcttcggattatgcagtggggatcaacgggcttctgccgcagattgacggtacgttgactcagaccacagactcctttgacagtctgatccagacgctggaccagacggcagtcatgattacagccggtgaggaaaaactggaccgcatcatcggtgaggtggaatcagtggaggagagcgagcggctcgccaaaattgtggagattatgaaaaacgatccggagaccatgggaaattttctctcgtcgccggtgaatctggaagaaaatcagatctatcccatagagaactacggttcggccatgactccgttttatacgattcttgccatatgggtgggcggccttgtgctggtggcagtcttgaagtgccgcgtcctggaggatgagaacatccatggcggtaagccctgtgaaaaatactttggcagatacttaatcttcatgctcttcggtgtggcacaggcgctgatcgtggcgctgggagatctgtatctgctgaagatccagtgtctggagccggctaaattcgtattggcggcagtcacggcaagcgtggtatttgtcaatatcatctatacgctcactatctccttcggtgatgtggggaaggctctggcggtcgttctgctcgtcatacaggtggccggggcgggcgggaccttccccattgaggtgacgccccatttcttccgtgtggtcaatccgatgctgccgtttacacacgccattaacgccatgagggagtgcgtcggaggaatctacgggaacgcgtattttgaggatatgggaaagatcctgttatatctgccagtttccctgtttgtgggcgtagtactgcgaaaacaggtgatgaaaatgaatgatttctttgagcgaaagctggaggaaaccggggtgatgtaggttcagcagccagcttttgcggtgcggcagtttgctgcagaccggtggtggaatatcatgatgccgccaataaggagggctgaaaacagcggaagcagaagccagacgtatggcagagaaaggccgcttataatcagacttcccaatagggaggtaccaagcccgcctgcgcgcagagacagggagagtagcgacatcatgcctgcgcgctggctgcttgcaacggtcccgtgaaaaatggtattttcaatcagattcccggcgcccagcacgacatagaccaggacgaagagaaccggaaacagccagacccggcgggtaaatcccaggacagcgacgctgagaatgagcagaaaacgaaggatccagtacgtatgccagcttttttccggtgtgaagaccatccgtttagactgcatgacggcttcggctgccttgctgccgatggtgacgccaagatagcccagacaggtgatcacgccaaaaatccagcccatctgcccggggaggaaggcctgaagcgttggctgccagtagacttcgacggtgcaaagaagcattccgcaggcagccgacatcaggacaatggtagtgaccggaagactgtgcagaagagaatgatacagcccccgaacctgttccttcagctgaaggacaggagaaagcgggcttttttcccgcggcggttcctttacaaaccaggtggccagacccagaatgagtatctgcaggatgaatgccaggattaagagaaggctgtaggagacatccagatagcccaggataccgcctgcaatggacccggaggcaaggccgacgctttcaatgacggccatggtgctgttgattttttccagattgcggccctcatgctcacagagatacgtctcgatctccagcgcctcgatggaaccggagctgaatgcacggccgatgccctgcatcgcacatgccgcggccagcatgagaaaatgacggctgaacagaagaagtgcatagtttgccatcataaaacaggcagatatcaagaagatccgtttcctgccgatcaaatccgctaaaattccgctggggagttccagtacaacgaccatgacggcaaatattccgatgcacagggataaattttccatggtggctccgtggctcagcagtacaagggagagtaccggggcgagaaggccggtgccgaaggcattggccccaaataacagaatatggcttcgtttcatggtcattcctccttttcttccagaagggggctgtggggatatgccaccaggccgaattcccaggggaccgtttcgtccccaggcactgtatgtgcatcggtaaaatccagaatcaaatgatacagctcctccgcatcttttcggctcaaatgaacgactccgctggtgaaatcgccggtcgtcatcacatctgactgatcttttgcccgctttaagcggtctttaaatccattccagagttccgtcataatatagtctgacagacaggaacgttcctcctttaaatcatcatctaaatttccgccaagggataccgagaccgggagttttttatagtattttgcctggattccgtgaatggcttccgtgtggtccagcttcaccagtccaagctcctccagcttcctgatgtgaagagagacggaagaggctgatatctttaatatattggacagctgcttgggggtcatgggaacaccgctgacctccatggcttttaaaagccgctggcgctgcggattcatatagatgtccatctgtttccgggtaacgagcgtaatcatgttctgttctgacataagatcctccttttgctgcaggccgtttttgagtagttttggaatgtttgatattattattataacgttacatattatgtaatgtcaagcggattttaaccgctccgttgctaatagtggtttatgtcagcttgtattaatttgagataggagtcaggagcgaaacagggcgggagactcagctccccacggaagaatggacgaaaaaatccggaccggaaccgataacgatctatcgggttccgatccggatccggggtgcggattacatgattactgaccttcgttcacgatctcctgcagaacgttgataagatcgtaaatcgtgttaatctgcacgttccgttccaggatttcattgtgggtcggatagacccagttgagtgcgcgaagcgcgcgaaatagaaaccacccgctatgcgggtgcgcggtgttggttataccaaaaatcactcagcctgatataatagaggtgtccaagccactattaaaaaggagagtgattttatggcgaagaaagccaatgaattagcgcatacaaagtggatgtgcaagtatcatatcgtcttcacccctaagtatagacgaaaagtgatctataatcaatataaagaagacctgagagatatcataaaacaattatgtaattataagggtgttcagatactggaggggaaattaatgccggatcatgtgcatatcctggtgagtatcccacccaagataagcgtatccagttttatgggctatttgaaaggaaagtcagcattaatgatgtttgaccgtcatgccaacttaaagtacaagttcgggaatcgtcatttctggtcagaaggatactacgtaagcacagtgggattaaacgaagacaccataaagaagtatatacaagatcaggagaaggcagatatcatgctggacaaattgagtgtgaaagaatatgaagacccctttaggggttagtcggtattcagatagccccttgaaggggcggcaacagaggtaaaagcacaaagtggcttgaacgaagtgaaagccagcgccttgagacgctggcctagtaacaaaggcttatagccgaagcgcgagccacccgttagacgggtggcagcgacttttcaaatcgatggaaagcgtctcgaatttggcctggacggcgggagcaatataggacatgttcatcacctcctggttaggatgtgcagcaagaggtgatgatatacggatgatcacagagaatttgcgggaacaggaatgtaacaaatactggaaatactagagcatggcgatactggtcagatacggattaccgttgattggctgataaatatcaacgacagcgaactgcgggtttaaatcctccgtctgcggctctgcaattgtcataaacttgtaattggttccgttgacgacctgtgtcgctacggctatgggcgtatagaaataatcattatgttttccgatcgcattataaaatatgaatgaatcgtatggagtaagatatgactgataagaccatcctcctggcatggcggcacctcaaaaaggttattcgtataatatatgcagaaatccaggaattgccgatttataatttacataatttgttgctatattttcatgaacacagccaatactatagactgagagtacagaatcgggaagtcagaattacagtttaaaatgatttaatacgctgttattcagatttgtaacaataaaatggatatctatggtataattaactgtagcgtccacagcaggaggtcttcatgcacgtttttaatccggtattttaccaagaatataacctgatgaattatctggattttgctgtggcgaagatagcaaagctttatccggaggttctgcgggaggagatctatctgcttttctacttaatcaaagataattttcaggcaaatatgaaatacctgagagaaaataatgtggatgtggattgcttcggttttctgccggtcaggaggaataccaggaattcggtggaagcattttttgacatgtttaatttaataaatgcggagaattatatatcggttctgttgtatatgcatgataaaaagaataaccggtacgatgatcgctataagaagtatgcgtttaaaggtgattttacaatagtcagcaagagggatattgcaaaggatcacggattaggcagaataacggatgatgagacaatggcgaaaatcgaccaggcagagagcgggtccaacagttatattcatccgagcatttttattcccctctatacgtctgcggatatcgaggcaaaagaggagattctgcgtgatctgctgcgggtcaatacctggctgttaggaggcgcataccaccagctgtgctgttttataaaaaagaaatacggaacgctgaaatcatttgaatgtcttaactgtacgaaggaagcggcgtgctttgaatgttttgaggcgtattatattgcgtttaaagagatgatagaacaggacctttttccgctgagccaggaaggcggccatgaggagccgtataaaaacaggagttagtgtatgagcggaaaggatggtcagactggccttgaatttaaggtaaacttgagtgggaaagcaacccggcccgagccggggcgcgcctcgcctcggaataccaggtgccgtcgtatgcagggaagtgagatgtgggaggaatacaatgtcaactacatattatatagtaaacagaaaacgaaaaaaagagtgcagggagtttgaaaaattctgggaagaggaatggtttcccatggttacagataagctgcatcaattttgtgccgaagcgaatggagagattgtaaatgatgaactggcagagcgtttgatgagagacagcttcagcgctttttcccgttcgccgctgagtgacagcttatataaggagccatttcttacggtaaatcatgccggcgtattctggcataagtgtgagacggaaggcgctctgcttaacagccttgaggatctgattaagtttttttccaaaagagcaaatcaggagaagtattcactggaagatgaaagcggccggggctgtactttaaatgaactgatcagcggagagcacagagattaaatggtacaggagagattttcgtttttcagcagcaaaaaagtgccggaagccttttaaataaggcattccggcacttttaccgaatcggagtaacaggatttgaacctgcgacctctcggcccccagccgagcgcgctaccaagctacgccatactccgtttctggtcactatggtattatagcagaaagtttgcgatttgaaaagtatatttgttgaaaaattttatattttaagatatgatggtaaagacgatatgattcatgcagaaaagacaggtgagaaagaatatgaaaccaatcgtaagttttgatgtagatatgaccctgctggaccataaggactggacgataccggacagtgccatggagactcttcaaaagcttcgggagaattacaccattgtgctggccaccggccgcgacatggattccagcttcagcgtcgtattaaaggaacagatcaggccggatgccatcattcatttgaatgggacgaagattacggtgggggacacgattatatacgagcatctgtttgataaggaactgatgaagcggattctcgcctatgcacaggacacaccatacagtgtgggagccagtgtgggcggatatgattactacatccatccggaagtggtgaaccgccacgacacggatctgtggggagaatgcggacgccggtttgcggatccgtggaagctccctgagttagatgtcaggaccatggcttacatcggtgatgaaaggggcgcgaaggctatgggagaccggttccctgagatcaatgtgcacatgttcgcggaaaagcggggcgcggatgtggtggagaagacgaccagcaaggctatgggactgatccgcctctgcgactattttcagacgcctctgtccgacacggtggcatttggggacagcatgaacgattacgatatcgtgaagacggcgggaatcggaattgccatgggaaatgcgatggaagaacttaaggaggcggcggattacgtgaccgatgccgtggacgcggatggaatccgaaacgcctgtgtgcatttcggtctgatccggttataaccggtccggatgcctggcattgctttcatgaaactatacagggaaggaaataagtagcatggcaaaacattatgatctctttatcataggcggcggtcccggcggttatacggctgcacttaaggcggcgggactgggacttaagactgcgattgcagagaaagaaaaactgggcgggacctgcgtcaataagggctgtattccgacgaaggctctgcttcatgcctccagtatgtttgcggcatttcagaactgcgatgtatttggagtgtcggctgatttcatttcttttgattttaagaaaatgcaggactataagaaacgttctgtaaaagagtaccgcaaggaagtaaaggaagcagtcgagagtgcaggaatcgattatatcgagggaacggctacgatccggcgtgggcggactgtggaggtgaacagtccgtcaggaaaagactattacgaggcagaccacattatcattgcgacaggggcgaagcctgtcataccggatattcctggagcgatgctgccgggggttttgacgagcgaccggctgctggcttccgatacctggaattacgaccgccttacgattatcgggggcggagtgatcggcgtggagttcgcgacgattttccaggcactgtgctcccatgtgacgatcatcgagagccgggagcacttactgggccccatggacaatgaggtctccgaggtactggaagaggaactgaggcggaagggaatctctgtccagtgtgaagccagggtcctggaaattcgcggcgaggaacagggacttgtctgcgtttacgaggccggaggagaggtgcggacgattcgttccgggcagattctcctggcagcaggcagacaaccgaatctggacggactctttggacaggacgtcagccttgccatggaagggggctgccttaagacagattcggaattccagaccagtgaaccggggatctatgccatcggtgatgtgacggctggcaagatgctggcgcatgtagcggcagcccaggggacttatgtggtggagaaaattgcgggggtacatcataccatacggctttccgtggtacctaacggaatgtttgtggagctcccggtagtgccgggatgcatttatactgagccggagattgcttctgttggaattacggtggaagaagcgaaggcccataagatgaaggtgcgctgcgggcgctactccatgagcggtaatggcaaatccatcattaccagagaacagagcggattcattcatctgattttcgaagaatattccggaacgattgtcggcgctcagattgtctgtccgcgggccaccgatatgatcagtgaaatggcgactgctatcgcaaatggcctgacagcggatcagctcatgcttgccatgagggcccatccgacgtacagcgagggcattacggcggcaatcgagaattattatgaagcaaaaggagacgaaaggttatgattcaagagagaattgcagcattacgaagcctgatggcggagcgccatatcgacgcttatatgattcctacctctgattttcacgagtcggagtatgttggggattattttaaatgccggaaatttataaccggttttacagggtcggcgggtactgctgttatcacgcagacagaggcgaggctctggacagacgggcggtatttcgtgcaggcggcaaagcagctggagggaaccggcgtgatccttatgaaatctggtcaggagggagtaccgaccgaggaagagtatctgaccgagatgatgcctgacaatggaacactcggttttgacggccgtgttgtcaacagccagatgggacagaagctgaaagaacttctggaagataagcacgtgaagttttcctggcaggaagacttagtggatttcatctgggaagaccgtccggagttatccgcagagccggtctggattttgaaagaaaattacgcaggcaaatctgctgtggataagattgctgatttaagagaagcaatgaagaaggagaagactacggttcatgtcctcacaacgcttgacgatattgtgtggctgttaaatatccgtggaaatgacgtcgtctgcaacccggtagtcctttcctacgcactggtgaccttggaacgcttctatttatttatcaatgaggcggttctggacagtgaagtaaaatcttatttaaaagaactgggcgttacgattcggccatacaatgatatttacgatgcggtgggccagttaaagggccagaaggtgcttctggagactgcgaagaccaactatgcgattatcagcaatttagatgagacgaataccattgtagactgcatgaatccgaccgctccggccaaggcggtcaagaatccggttgaaattgaaaatatgaagaaggctcatatcaaagacggtgtggccatggcgaagtttatcttctggctgaaaaagaatatcggaaagcagacgattaccgagctcgatgcggaacattatctggatcagctgcgcgcagagcaggaggggaatctgggactttccttccatacgatctctgcctacggggctaatgcggctatgtgccactattcggcgacgccggagagcaacgcggttctggaaccgaagggactctatctggtagattccggcggacagtattatgaggggactaccgacgtgacgaggacgatctccctgggagagacgacgcaggcagagcgggaacattttacactgagtgtcatcagcatgctgcggctggctgcagtgaagttcttatatggctgcagagggcttacgctggattatgtggcgagagaaccgctttggagcagaggactgaactttgaccatggaaccggccacggggttggctacctgttaaatgttcatgagcgtcctaacggaatccgctggcgcatggtgccggagcggcaggacaactgcgttctggaagaaggaatggtgacttccgacgagccaggcgtatatattgaaggcagccatggcgtgcggacagaaaatctgattgtctgcaaaaaggcggagaagaatgaatacggtcagttcatggaatttgaatttctgacctttgttccgatcgatttagatgcgctggatcaatcgctgatgaatgagcgggacgtggaactcttaaacaactatcacagacaagtgtatgagaaaatctctccgtatctgactgaggaagaggccgaatggctgaaagagaatacgagagcgatctcatgatatcaggcggagcatgcgcatatgccctgatgatggcaaggtcttaaaaacagaatatccgcaggaaacgggccggatggcgcgctgcgggttcatttgaaaactgccgcaagggtcaaatccccagcgttttccggtaccgcagatttactgctgcgccggagaacgctggggatttgacttcaatcgtcttccagacagggaacatttgctatggttccgcttgtttttgggttatttctttacgaagccgcatcagaagcgggataatcgcttcccaatcttcattgtccagttctttcaacaactccacagccctgcggaactgtggcggttctgccatttcggtatcaaaaaattccagcggagtaatttccaggtaatcgcaaatttcgaagaattgtttcatggaaggcatggatcggccagaggaaataccctgaatgtaactcttatttttaccgagatccagactcatctggtattcagagacatctttttttaaacggagctctgtaattctgtttctgacaaactgttcattcattcttatcacctctatggttaatcataaaggataatctttcccgacattccgttttatatgcgtaataatggctgaaaaattggttgcatatacggataaaaagcgttattatataagttagaaaaacgaaagagaaagacaaaagaaagtgcgtgcctatagggcgagaggatgtccgatgacagaatatttaaaaaaatggagggataaagggaccgggaaaccccgggccgttttatgcatattggtttatatccttattatggcggggatgattggaagtttacggatgcagtccaaagggatggctgatcatatagcgtgggctgtatttattgtatccctggtggcgatgggagtgatttcgtatccgctgatatggggaaaagacaggggagagggagaacggctggaagaggggaagatggagaaacaaaaagaacaaaaggaacaaaataaacaaaacgaacaagataagcaaaacaaacaagataatcaaaacgagcaaaaggaagacaggcgggaagcgttgtaccgcaggcttggggaatttacggatacagtcctgtttgaatacagataccgtgacggaagcattctgtttacccccaatgcatcaaaccagatggagacttctgttctgaaaagcgcccttgagaaatacgtgaagtgtccgccgctgcagggagaaagcagatgctttgaatttcgcatgaaagcggatacggaggactatcgctggtgcatctgtcatatcagggcagaatatgacgggggaaaggagtctgtagataagtatgcggaagcagagaggccggtctgcctgataggaaaactggacgatatcagcaaacagaaggagcgggaggagcagcttctgtttcagtctaccagagatggcctgaccggtatctataataagacggcctttgaatatatgatggaagagaccttgaaaaggggaagccgcggcagtttatatatgatcgatatcgataatttcaaggatgtgaacgaccagtacgggcacccggccggcgataggattctggttaagacaggcgaacttctgcgtgaaatcttccgtgattccgacttgatcggcagagttggcggtgatgagttcgtagtctattcggaaagcggagataccaaaatgaaggcattaaggcttctgaacggaaccgcagatttttcaaaagaaggcgaattacggatttctgtgagcatcggaatagccagcagcaccgggaacccggacgaagagtaccaggaactgttttccagagccgatcaggccatgtaccgggcaaagcaggaggggaagaatcggattgcctggtatgaggagtagggaagcggggaaaaagcgaattgtggaagcaaactatagaagcaaaatatagaggcaaactatagaagagaagtggtaatgagtggcggtagcagggaaaatgaataagaaatgggatggctgcgtttaagacgcagccatttttgtgacagaaggaataaatcaggcgatgctaaactagtcagagtcacaggggagatccaccagggtataggaatgaccgatataaggaagaaaaatatttacgatgtctgaggtccggattttcaaactggaggtgttgatgcagggatggcagccaagaaattcctgctcaagaatatctctgtcaatcagcagccggacgcggttttctttatcattcatcagtcccagaaccgatactgaaccgggggtgatatttaaatactgttccataaattcaggttctgcaaaagagagcctggccgagccgatctgttttgacagaactgccgtccggaattttttgcagccgggaatcatgagaagataaaagctgtttttctgggcattgcgcagaaataaatttttacagatctctgtttccaggagtgcatcgatatcgtgacaggcctctattgtagcggtcggatcatgatccaggcgctgataggcgataccaagtttatccaaaagatcgtaagtgaccttctctttttcaggacgcccggtgagatctgcgggccgtccggtatataaagtccggtctatgtaaaaaacatgggcgggagtgatattttttgctgctgtgtttgccatatgaaatgcctctttctgtttggattcggtcaaactggtaataggaatatgagtgttattatacaagagaatggaataattgcaagaggaaagcaaaaatggttgacggaagaaggtaaaatgggaccggctgtatgttggaaaatgggggatgctgttatcaatacgggaaaaccaggtatgaacaattcttttttcattggctttatgcggtgtcttgtattataatgatttttacaggagtaaccggttatgaacggggattaagattgtgtaatcatttgctggattatttccgacaaggctgacagatggaatcagcagaatgggtgcatttaaaacatatagtaaatgaaaataaaagaagaaaaggaaggtcaactcaaatgattgaaaaccgactgaaaaatgaaagatcgagagtattgacagaaaagacgatgagttcgaagcgtgatgataaatctgcaaggtacggagaggggaagagacgagaagataaagcagtaaatacggcaggaggcgtttccggtaagcgtggaaacaatacagccgggaaagcagggcacaagccggagaaaaggccgctgcagaagggaagtaatcaaaaaacaggaaataacagagatttaagaagcggcacatctgctttcaagcgtggagtaagcgcgaaggaagaggggcatccggttaggaaaaatactacgccatgtcctgtatttctgcgctgcggcggctgtcagcttctggatatgccatatgataaacagttgagcctgaagcagaaacagttggaggaattactgaaaccgtactgcagggtacagccaattatcgggatgaaggatccgttccattacagaaataaggtacatgctgtgtttgaccatgataaaaaaggaaatcctgtttccggcgtctatgaggcaaatacacatcgtgtcgttccgattgaaagctgtctcattgaggatcagaaggcggatgagatcattggtaccatcagaggaatgttaaaatcatttaagatcaaaacgtttgatgaggatacagggtacggccttctgcgccatgtgctgatcagacgcggttttgcaacgggtgatatcatggtcgttctggttacggcatctcctgtatttccttccaaaaataattttgtccgcgcattgagagaaaagcatccggaaatcacaaccattgttcagaatattaacggcagggataccagcatggtgcttggagacagggagaacgtgctgtacggaaaaggctatattgaggatattttatgtggatttcgtttcaggatctcttctaaatcgttttatcaggtgaatccggtacagacagaggtgctttatcggaaagcgatagaactggccggccttaccgggaaggaaacggtgattgatgcatactgtggtatcggaacgattgggatcgtggcgagccaggaggcggaccgggtcatcggcgtggaattaaaccgcgatgcggtacgggatgcagcccaaaatgctaagattaacgggattaagaatgcgcagttctattgtaatgacgcaggggcatttatgagtaaaatggctgataacggcgaacatgttgatgttgtctttatggatccgccgaggagcggaagtacggaggagtttatacagtcggttgcgaagataaaaccggagaaagtggtgtacgtatcctgtggcccggagacgctggccagagatttgggagtgttcaggaagatggggtatgaggcgaaagtggcgtggggggtggatatgtttccgcaggctgcacatgtggagtcggtgataatgatgcagaattgtggttttaagaaaaaatagaggttcaaaccacaagatatagtggtttttgggcaaaaatcgagcaaaaaacagggcaaaaaatggccgtttttagccccgatttttagccccttccacagatgcaggaaggtatttcagtgatatatgggaaaaattcaagttcagccgacgaaaaattggctgtcctttactgccggttttgtggattttgagtcgctttgtaaagcaacgagcagaaaatgccggaaagtaaggaagaaagagaacttgcgattgaattgactcctggaagaagatctgcccaagtggtgtcttatggcatgtgtcatgatggcatatgaagagaacattccaagacgaagaaggtagtaatgcagagcaaaggataaaggtgcatacattattttacgaacttaataactcatggatagccatgttgaaaatactataaatcttcagtataatctaaaaaaaggggggattatatggatcttcgcgtgctaaactattttctggcagtggccagggaggaaaactttacgcgggcagcacaaatgcttcacgtcacccagcctaccttatcgcgacagattgcacaattagaggaagacctcggtgtaaaactttttaccagaagcaatcataatattatactaacggaagatggtatgattttgaaacgccgcgcacaggagttgctggctctggctgagaaaaccaggcaggatttaaggcacagagatgaggaactcaccggaaaaattgctattggcagcggagaatttcaatctaccagatttctgtcgcagatgattgcctccttctcggagaaacatcccaatgtgcaatatgagatttacagcggggatgcggataacattcacgattatgtagagagaggtcttctggatatagggttgatggcagaaccgattgatattcgtaagtatgattttatttctatgccggtaaaggaacgctggggagtatgggtaaacacggattccgctttggctcaaaaagaatgggtgcagccggaagatttagttggaaaacaactaatcactgccacaggcgaattcccaaagagcagtattggtaaatggcttgatgattataatacgcaggtgaaaattattgctacaggtaatttgttgtacaatgaagcaatgcttgcggagaatcatttgggaattgtacttggtattaagctgaactatacatacgataatttgtgctttgttcctctttatccaatacttgaaatgagcacagttctggtatggaagaaagaacagattttctcctctgccacgagcagttttattgaattcgcaagacaatacgaaaaagtaatatctgacaataaattataggcattagacatagaatgaatataggcttacaatgagggtgttccggaagggacatccttatttatttacattatcgtgcgaagcacgcctatggggagcattaagctgcggtgtgaccttttggtatgaataatcagcgaggtgagactatgacaattaatgaagcaagtgaacggtacaatattccgattgaagttttaaaggaatatgaaagctggggcctgtgtgatgaagtgagaagggtgatgggggtatggcagtatgatgaccgggatatacaaaggcttagtatgattatgaccctccatgatattggctttgacaacaacgaggttgaggcatatatgcgtcttcttttggaaggtgattccacagaagaagaacgcctggatatgttaaacaaaaaacgtggagtgaccctcgatgaacttcattttaaacagaaacagttagaccgtgtggattatttacggtacaaaattcaaaaaacacataagtaaattcggcagccatactcaaacaaatacttcaaagaggaggactttagaaaaaggaggactttagaatgaaaaaaatattatcgtttatctgtgtttgttccacggtgtttgttacgaccgcctgcagcagccagggcagtgcgtctgatacgggcatgtctgtaccagcttcttcacaagaaaccggcaaagcggcacagcaaacggatcttttgcagaacgacagtgagaacgcctctgttacaaagaaagccggcgaagaaacggatgatacaggaactgaggaagccggatctgatattctggttgcatatttttccgcaacgggaacaaccaggaccctggcagggtatatctccgaagttacagggggagatttatatgaaatcgtaccggaaatcccgtattcatcggaggacttgaactatagtgacaataacagccgaagcaccagggaacagaatgatgaaagtgttcggcctgtaatctcaggcagtttggagaatatggatcagtacgacacgatttttctgggctatcctatctggtggggagaagcgccgcgtatcatcgatacctttatggaagcttacgatttcagtggaaaaacgattgttccattttgcacttccggaggcagcgggattggatccagcgcacgaaacctgcacaaccttgctggctctgatgtaatttggctggatgggaaacggcttagcagtgatatttctcatggtgaaatggtgagctggattgatggactttcactggatgtgatggcccagtgaaggcggcggtaaaaatgatggtggatatgagtctgcttgtaatgcttcctgttcttatggcagaaatattgactgggcaggaatttcatgaatggcttgggacggcaatggctgtcgtgctaatcctccatcatctcttaaacataaactggctgaaacatatcgggaaagggaattatacgcccctgcgcagcctcattaccattattaatttactcctttttgcagatatgtctattcttatgatcagcggtatcgtgatgagtggatttgtattcgagtggctgcccatttcaggaggtatggttctctctcgtagacttcacctgtttgcttcccattgggggctaattctgatggcactgcatacgggagtgcattggagcagggttgttagattgggaacaaagtttttggaaaaatcagaatcagaagatgaattggcctggctggccagaggtcttgcagctgcaatttctatatttggtgtttacgcttttatacagcagaacatgtcagactacctgttcttaaaaacggccttcgtattttgggatgaaacgaagacagctgcttcatttttaacagaaacgctttctattatgggattgtttataacaatcggttattatggacagaaacaaatgaaagggttaaaaggaatgaaacataaaacggcaaaatatctcgcttttttaattccaattctggtttgtatagggactatttgctggatgatgacaggaaaccgtgcatctccagccgattcgtgggaaaccacaccttctgtggcaacagaagtaaatgatggatatgtcttgattcctggcgggacatttttaatgggaagtccggagcgtgaggcatggagagacaatcataccgttttgtagtcagggcggtggaagattcggacagagcctggcatttattgcaaagctggcgccagatgcgatgattggcgagggactggcaattagctactcaggcggtgaatctttgtcttctatgtaagtacatggcttgagcttaacaaggtgagacaataaaaatagtgaaggaggaaaagggaaaataaaggcttgccggatagaggatatataaatgatattttggcgaatgccaatcataaaataaagctaaataacaggaggaaaaaatgcgaaaattattaaagaaaacgttagcgattacaggttgtgtagccatgatggcttctatgactgcatgcggtgcgaagccggagacacagccagaggcaacaaggcagacagaggcaacaatgcagacagaagcaacggcggaaacagaaggacaggcagtaaaggagggggacgcgatggcagtgaattacgggaacatgaaggatgtcagcataaaaattgaacctattgaactcacggaagaatgggacaaggtttttcagctcagtgatgaagtaaatcatagaaaagtaacatttgctaaccatttcggtattactctggctgcggatctttatgaaccgatggagtatacgggcaagcttccggctattgcggtctgtggcccttttggcgcggtgaaggagcagagttccggactttatgcacaggaactggcaaaaagaggatttctggctatcgcttttgatccgtcttttacaggagaaagtgccggctacccgagagattttaactctccggatattaatatcgaagattaccaggcggctattgattttctttccatacaggaaaatgtcgatcctgaaaaaattggaattatcggtatctgcggctggggaggtatggcggtgcagacagctgcacttgatacaaggataaaggcaacggcagcaatgacgatgtatgatatgagcagaaatactgcgctgggatattttgattctgtggatgaagaaggcagatatgaggcccggatagcttacaatcgtcaaagaacagaggactataaaaacggatcttatacaatgggaggaggacttcccgaagaagcgccggaagaggcacctcaatatgtgaaagactatgttgcatattacaagacagagcgcggttatcatccccgttccgtcaatgcaaataacggctgggcggccactgccggcggttctctgatgaatatgcgtctgtttgaatatgctcctgaaatccgcagcgcggttctgcttgtacacggggaagaagcacattctcttatgtacagccaggaggcatacaaactgttacagggagataataaagagctgatgcttatccctggcgcctcccatacagatttatacgatcagatggaaatcatcccatttgataaattggaaacattttttaacaacgcatttacacagtagttacggatcataccggagcgattcaatccggaagcagtacaactggaatcccggaagacggtgcgaatgaataacaggagatgaccatgaaagttttagcaattaacagcagtgcaagaaaagatgggaatacagcaatccttattgaccatgtatttcaggaactaaacaaagccgatattgaaacagaattggtgcagctggcaggtcagatcatagagccctgtaaagcttgctgggcctgccaaggaaagaagaactgtgtgcataagaaggacacattccgcaatatttttgaaaaaatggtgcaggcagacgggattctgctgggctctccggtttataccgccaatgtctctgctaatatgcaggcatttctggaaagggcagctgtggtatgcgatctgaatcccggattgctcacccataagacaggagcagccgtgacagcggcacgcagaggcggcgcattgcaggccattgacagcatgaaccactttttcctgaatcatgaaatgtttgtggtcggctcggtttattggaatatggcatacgggcagatgcctggcgatgtcctgaaagatcaggaagggttggataacgcaggtaatcttggtcgaaatatggcctatctgatgaaaacattacagaaaggccagagccttatatgaaaaagacaatcagcatacgaaacggtgttgacaaaatccacacttttgcatatactaatcatatcaaataattttgatgtgaggtaaaacgtggagacaacatatcagaaaaatgccaaggtatttaaggcgctatgtgatgaaaaacgacttgctatcctggaacaactgcgcagtggagaaaaatgtgcatgtatattactggaacaattggatttaacacagtcaggactttcctatcatatgaaaattctctgtgaatctgggattgtatccagccggcaggagggaaaatggacccactatcggttaagcgcggcaggcagagattatgcagtagatttgctgaagaagctgaccacgccagatacagagcagaagagcgaatgcatttgtcagggaaattaaacgccatctttattggatggcgtttataaaacaagaacacatcaaaaaaagttgatatgtgtgctccgcaaaaatgaaagtgaggattttttatgagcatttgggagtttatacaagaccaggttctgggaatgaagtggctgaacaaaatgattggaagcatgctttcttctttgggactggacataagtgggcgcgttgggggcagtgttcaattttttatttacgatgtagtaaaaataacggtgctgctttgtttcctgatttttatgatttcctatatccagagttatttccctcctgagcggagtaaacggattctgggccgttttcatggaattggagctaatattatttcagcgctgctggggactgtgacaccattttgttcctgttcctccatcccgctgtttattggttttacaagcgcaggattgccgctgggggttacattctcctttttaatctcctctcccatggtggaccttggtagtttgattcttcttatgagtatttttggaaccagggtagccattatctatgttgttgtggggcttgttattgcagtagtcggcggctcgctgattgaaaaaatgcatatggaaccttatgtggaagaatttattaagactgcaggcagtgtagatattgaatcaccgtctctgacgaaaaaggaacgcctgacttttgcaaaagaacaggttgcggccacctttacaaaggtcttcccgtatattctgatcggcgtgggcattggcgcaatgatccacaattggattccggagagctgggtggaggctgtcctgggaagtaataatccaatcggtgttatcctggctacgttggtcggtattccgatgtatgctgatatctttggaaccattcccgtcgctgaagcgctgctctttaagggagcgcagctgggaacgattctctcttttatgatggcggttacaacgctgagcctgccttctatcattatgctgcgcaaggcagtaaaactaaggctccttggcctgttcattggaatttgtgcaggcgggattattctcgtgggttatttttttaatgcgatacaggcgttcatcatatagaaaacttaggtaacaattattcggtgctcaattgtcaaatataatataaaaggagatcagaattatgaatttgtttgggaagaaaaagaaagaagaaacggcaggctgctgctgtggcggaaactgtacgcctgaaacgatggcacaggctgagaatgctaaaaacgaaggagcctctgttaagatactgggatccggctgtgcaaaatgcaatcagttggaagaagcgacgagggcagcgcttgaacagttaggtatggataccgccgtcgatcatgtgactgatttttcacagatagcagcctatggtgtcatgacaacacctgctttggtagtggatgggaaagtggtatcgatgggaaaggtccttaaaactgaggaagttaaaaaaatacttcagaagatgagggggtagaggacccgacagggaaagacgatgatgaatttgtatatgtgatacagtgcattagtgaaaatatagagaaactcaagaaaaagatttatttaagaacaacgatacaataaagcaggtggctgcccaaggggatactggttgaaaccggtatcctttttctctagcaggagaaaaaaagaaggaggcagggttctggccgggaaaaggtatctgacataaaactcgaacaaatgttccttttttggcttgcgcgatagaggctgatccggtataatagagtgaagaggtaaggaggcagagagatgattcgactatttgaatttcgggatttagacaagattatgaacatatggctggagggaaatctggaagctcattcatttatagatgcagagtattggaataagaatttcgattccgtaaaatcagtattgcccaatgcggaggtatatgtatacgaggaggcaggagaaattctgggattcatcggaatggatgcggaatacatagccgggatttttgtagcggcaggacataagggacagggaatcggccatcagctgattgaagcggtgaaaaagaagaagaggctgaccctgcatgtgtttgaaaagaatactggggcaatggccttttatctggcagagggattcaaggtccgggagcgaatgacagaaaaagaaaccggagagagggaatgcctgatggtctatgaggacggacaataagggcttgatgaaagagaaaaggcgctcccggcttatttgatggaggaaaccggaggtggtgatatggcaacctggaatccatggcacggatgtaaaaaaatcagcccgggctgtgcaaattgttatgtttatcggagggacgctgaatttggtaaggacagcagtatcgtgacccgcacctccagctttgatatgccaatcaaacgtaaccgcaagggggaatacaagctgcagccggatggcgagagtgtgtatacctgtatgacctctgatttctttctggatgaggcagatgaatggcgtgaggaagcatgggatatcattcgcaggcgcagcgatctgcactttgttattattaccaaacgcatacaccggtttgaggtggaattaccgggggactggggaagcggatatgagaatgtgacgatctgctgtacctgtgagaaccagaatcgggctgattaccgtcttcctctgtttctgaatttgccgatcaaacatcggactgtgattcacgaaccgatgctggagcagattgatatccggaagtatttgaccacggggaagatagaaggggttacctgtggaggagagtccgggccggaggcaagagtctgtgacttcgcctggatacttgattccatggaacagtgtgtggaatatgatgtacctttctggtttaagcagactggggcaaggtttaagaaggggaataaggtgtatctgatagaccggaaggatcagatgagtcaggcgcagaaggcaggagtaaattatagattctgaatattatattcaagtgttattgtggatgaaaaatttgagatataaatatatcaaaaacgtgtgcatttattgaataattgatgttaagatatataggggtatatcttgaggaaaagacagccacaggagcgtgtttgcatggatggttggctgtctgaataaaaactgaatgccagtgtaatttggaggcatattgtttagcagattaaatatatttccttaaatcggaattttaaggaggcaataagtatggataaccttgccattcattttcttaattatgatgagcaattggtcacgcaagaagcagtaaataaattgattacaatattcgtaacaatcagatttcaaatgcgtggctggctttggatgaatatggtgaagaggactttctctctgtggatattgcgaatagatgggtggcacttgcctttaatacatgggacgagaatgggattgctcatatgtatcagccaattaatcagaagtatgaggactcccaagaggatgcgcctgtaaatattggaagtcaaacgccagttctaaagcgaaatgcgttagataatttagacttggcagcagaatgtgtcctgcattttgccaaaaccggagagttgtatccaaatttaaagtgggaagaagcagaataaaacattccccaacttccagtttatcggaaagctgaacagtgcagcaaaatcggaatttgatacagagattggaggtgtgacggacatggaaactgatggaaaaacattaccagatataagtttcaatgatatagattttggcagtggtataagacagaatgatggtatgctttctgttctctggcctgatggagtatgcttaaaattacaaaaagattgggcgtattcattaactgttgagcgtgacggatatatattcacgcgtcaaagattcaaaaagaaggataaccagcttttgatttgggtagaaagactggcaaaggatatttctaacggaagatataaaacaaagaaaaccgagaaagagataattctggatatcatcacccaaagaaatttagcaagctttatgaacaacacaaagtggcgggagttacgaacagggatgctcaatgaaatgccttttgtgcccccatacgaatataaaactctttttgatgacagtgactacatttctgaagattatgtccaacatcttataaaaaacgaagggccaagttgcctttgtagtttggatgaggaaagttttaacttcttaaattacaaagcgattgaatggttaaaagtcagaccgtgcttttttacggaagaaggtgggcagttggtgaaaaagaaagtatggtatgattgcgaaaaggaatttactgaaatcctcaaaaaatattcgataccatttgaactgcaaaatggtgtttataccatttatggatataaatagtctgcactaaaaataaaatttgcaaagcgataacgtcccgttgctaggggagttgaacagcgcgaaaaatcgggagttggaggaaagaagaattatgagcaaatataattccctgtgggaatatattcaaaaaaacggaggttcatcattcaaaatgacatttgaagaaatacagaatattgccggaataccaatagatcactcttttctgaaatataaaaaagaacttacggaatatggatatgaagttggaaaaatatccatgaaagagcagacgattatttttaataaggtagactgataacttcctgtttgttggggagttgaatcatacgagaaatcggaattttggaaggaaaaagataatggcaaaagaaaaggcttcattcaaagaatttctatcagcagttgcgccagaacaccaggcgtttgtcgagaaacttaataccaaacttattgaacagggctgtgttcttgtaattaaggaagcaaaaagcggttatgctgcttcatatcaactagagaagaaaacagtaatgaattgggtgtttcgcaagtctggtattttggcacggatttacggtgacaatgctggtaagtatgaggatacaatcgcttctctgcctgctgatatgcaaaagaaaatgattacttctcgtgactgcaagagactaattgaccctaatgcttgtagcgatacctgtgttaaaggttttatttatgccttgaatggcgttacacacaaaaaatgtcgtaatgacggaatgtttttcctgctgacaaatgaaacagcggagcatatagctgagttggtctgtgcagaggttaatgtgcgtaagtcagttttatagcatcagaaaaattaattctaataaatctgaatttatttagaggtgtacaatgagcaataaagagattataaaatacttttacgaggtggtcgtttcagagaacatgcttgatgagcttccgcaatatatttcagaagattgcgtgcaaagggacggaaaaaacgagatttttatcggcatagatggaatgaaacaacaccttatgtctgttaaaaatacgtatcccgactacacaatggagattatccgccagtttgaagacggagatactgttatttcggaatttattatgagaggaacgcataaaggcgagtttattggaataatgccgatgaatagggttattgaaatgactggtgtagatattgataaaattgtgaacggaaaaatcgttgaacatggtggtgcggtaaacacttttgatgctttttgggaaaacggtttgattaagccagtataaatgaaaattcaaatttgttgagctatgtataaatatataagaagctgtcataatgctgcattcagttatttatgacaacttcttttctattcccattctgaatatttcgaaatgggttatcattaaaggagaaaggtggcagaatgactttttttgaagaagagctgaggaagctcatggaaaagagctgctataatgataaggtgacttttttcccttgatgtgttatgtaaaggccgggagctatattcggatgcgcacggagtttgaaggggatggaaggtatcgttataatggtataaaaatgacgatgatcaattatcgtaaagcagaggttgattcgtcatctggagtgaattatggcgtttacgccaaggcccttttgcgccttttggaaatcagaatcacacactccagacattgcgaggtttgtaccaaattatgtcgagaaaaggaggggtgacatcgaatgtttgataatgataagttgttattttcagcaaataatgaaattgaccatgtaaaaggtattgttaaagtgtacgacagttatgttgctcagaatgaggttggaaaagaaaaacagcaatttcagcagattgcaaaaataatgaaggagaggacagaggaacgttatattaaaccgataaaaatgtttttacataattgtaaggagcatcctgaacaatcaggacttattgttatgggaataaactgtattctaatagaactttattttgaaatgattcatggacttgataaatcggatgaaggtggacataaagtacaagacgcatacactgcaatactcccattgcttgatcccagtatcacagaagaggatgcaaaaagattttacaaagggactcgttgtaaaataattcatcaagggcaaactggtttgtatacggcaattacttatgccgagttaatagacaaaattattattttatgtggtgaatactatctatgtaatcccaaagtattgtttgaagcgttgactttactgtatcatcagtattggaaagaattgtcagaaggcaaagaccctattcaaaagcaaaattttatcaagaaatttaaatacatattgtaccacgatgattgatggatttttattaaggttcaattatgctttgtagtaaatttctttgttttttaaatacgctgggagatttgtatagagttgcgctggaaatagtagataacaaaaacaaaactaagtgcataatagtcagtaaagagagccccagttttacagctcctatatcggggtgacgccatgatgctgtattaggaaaaatcataatataggaattgcgctaaatattatatagcatgtgcagcaatgcgggagcaagaaaataattgagaaagtaaaaaaagatagagatattaatatttctgtcaaggtccgaccatgtctttcgggagtctttttcacacacttcataaatgttgaggcctgtatggaattgtactggaaatagattaagctaaagaataaagattcaaaggagaccagatgatgcactgcggatcggagaggtcgatttagtatttaacgatcacaggcgtgccttttcagaattgtaagagaactttttagttttaaccgcatatacctacatcgaggtggcaggacagggccttttcagccacttgaagagtgtaaccatggaggaacttcgccggattccatgtatactgacttcctcaaaagatcaataggagaatgagcaggaatactatcagaacacgttggagtatggtggtgattttctatttgcggaaagtctggaggaaggacgtgtgatggtggccgctaaccgcggatgtctgccgcaggcaggttccacgattcaccgtatccgctaattcacaatgggagtcaaattacacgcaattactgcactttctggaaaaggaaaaaacaaatgaatatctgcagaccttcgctgaattgcagaaagaagcgtttgcaaaaacgtaatacatatcgggctgcttctttatgaaatgaaagaggcagtttttttatgcccttcaaccaaatgactgaatcaattttcggataagactatcttattaaaagaccatgataaatcagattgtttcttgttttcatactttttataataacaagaaaaggaaaggagcaggtaatttccgtagcttcataccgcattatacagcgcaggcttatgaagaaaacaagaaactgatagtacggcttagatggctgccagagaaaaagaatgccattgaggcagctttctcttacatggactttgggcaaataaatgtacattgtgccgataccagtttcacgcaaagacagccccctccgggagaatgcgggggctgtcgaggtgaacctgacaacagagaaaatagcagatattaatgagaaacttggtcaaatggagatattcagtatgtttggcggatcaccagttaaaaaatagggggacttacagattaaaaaaagtgctgttattaaccggaacaggccgctgtgaagattatgaatgaagccaggtttgatgcgcttgcatatgagatggatctcttttcccgcagctcaatctgcagtttaattgtggaggcgcaaacgtacggtaagatagtcatgctggcgatgcccccacagaagaacttctgtcactgaatatcctgcagcaggggaacatccgggatacgttgcacgcctatcagccggcaaaacgctgtaatgaaaatcgtgtcatggctgaggttgtaaagtggggaaagcgtgaagcacgcattaatgatattgcaccaggcatcatcgtcacaccattggcgattgatgagtttaacggactccgcggcaaattttacaaaagcatgtttgcaaaatgtcctctagcacgtccaggtacagcggatgaggctgccaatgcggcggaacttttgatgagctataaaggagcatctattaccggcgctacattccttattgatgacggcgcgacttccaactattattacggcccccctaggccccaggaagaaagctcaaatcaaagtgtctgagttttttcctttgcagctgcaaattcggagggaacggcctcgtcaggcagggagtcatggattttacaggttcctgcctccctggcagtctcatagtaccagcacttgtaatccagaattgcgagggtatcctgcatttgggcaatttgcttcttaacaatatcccgctgctcttgcatcagtgccagacgtttatcgatagtattgtcgccctccatgcaccaatccatgaaggttttaatttctttgattggcagaccggctttttttagacattcaatgatggacagccactgaaagtctgcatctttaaacatccggattcctccgccggatcgctccacaaagggcagaagtccttccttgtcgtaatagcgtaaagtagagggcgccactcccattttttttgccatttcacctaccgtataaaacatgatgatctccattcctgaaaagttgaatacttaaaaactgaaaaaatatcttgacttaaacctgactttaagttgtatagtttgattgaacttatgagcaaagagtaacatgcagaaaaaataaagtcaagatggaggtaaagaaaatgaactttaaggggtacattccaacccgtgtcctgtttggcactggatgtctaaatgatctgcatacccagatcatgccgggaaagaaagcaatgcttgaatgcgaccgcattccgcttacggatgaagaatgtacggcaatttacgaaaaatcgtatcgttaaacaaggaggcatttatgaaaatcttattgttatattactcttatggtggaaatacgcaccgtgctgcgcggcatattcaaaagatattgggctgtgatgtacaggaaattttgactgtgacaccctattcaggagattacaattcggttgtcagtcagggaaaacgggaagtggaggaaggatacgagccgccggtccgcccctttgataaggatctagaccattatgatacggtgattctgggaacccctgtctggtggtatacctttgctccggctgtaaagacggttcttaacgccgctgactggaatggaaaaacggtttatccgtttgccacaaacggaggatggattggccatacatttcgtgatatgaagacggcctgtgccggagctgacgtaaaacagggattgaatatccgtttcgatggagatcagatgcagacctcaattgcagaaatcgaccgttggacggcagagattaaggaggaataaagaatggaaagaccctatgttttctgtcatatgatgacgtcgctggacggtaagatcatgggaaactatatggaagcgccggagtccggtcctgccggtgacgctttttatcaaatcgctttcggtaaaaaaccaaaatacctgcatcagggatggttgtccggacgtgtgaccaccgatgataattttaccatgtaccgcagaccggcgctggatgagaaagcgcccgaagtgccggagggtgactttgttgcggagaaagcacccatgtattatgtttccattgatccgtccggcagactcggatgggaagaaaatacgcttacctatattgataccaccgctcatgtactggaggtgctgacggaacaggcctccaatgcatacaaagcctttcttcgcaaactgggcatttcctacatcattgcaggaaagaaaaccctggattacagtgaagctctgacgaaattaaagcgtttgtttggaattgagactctgatgttaggaggaggcggtgtgctgaactggtcctttatccaggcggggatgtgcgatgagatcagtgtggtgatagcgccctgtgcagatggctctgcagagacacagaccctgttccaggccagggcaggattaagcacagaggaaccggttggctttactctgaaaagtgctgacgtactggagggagatgccgtatggctccgctatcttgtaaaggaaaggatcaaatgaaccagataaaagatggattcccgggaattaggacatattacttcggatctctctgcgtatgacaccatgggaaatccggaaatcatgcagattgcgctgataaacgaaaagatacgccgccaggagagaaatcaaaatgcctggcggcgtatcttcttatatttcatacaatatttcatacaatttcctgactgcctcaatgaactttttcgttgagcagtgggctcattggcattaatcaggccatatggaatgccccataccccatgctttccagttgcaaaatatagaattataaagtataatatggcttaggtaccaagaatttttatgaaatattcataagaacccagcttaatatttaaattatggtttcatattaagaaaataagcgaaagaagttgtaatcgatatggacagaatacataatctgatagaacacgcgttctatatgccgggcatcagtcacttcgtatcatctaaaaaagccatccagacgatggaatggggcagggatcctttttcagcatccggatggctttttgtgcctttgcatcgtacacggagttatttccgtattgcccgtctatcatgaccagtccttgaaagcttttcggtaaactgatagattaatgaggaggaaacgagatgaaacgcaacggaaacaggggaatggcaggtatgctgggtacggtcctgatacttttggtattgactggctgcggcagacagatatcggtacctgaagaaaaaattgtgatcaaaattctttataatggaaattttaatcaggtaaaggaattggtagagtctgcctgcggcgatatcgagcttcagacggaactgtcgctttataccagcgagcagcttcgccgtttggacagaggcgttgggccggacctggtgatcacggcgcagcccgattcaaacatggtgcggaagcatttactggatatcagcgacacaaaggccagcgccgcctatgacggcaccattatgaatgcctggaagacagatggaaagacgtatatgatcccgctgcccggtgtgtacagtgggtatgtagtcaatgaaacgttgtttcagcaggcaggaatcgctttgcccacaaataatgatgaactggtaaccgctcttactgaactaaaagagagagggcttggcactggagaggatggcgtgagtttttccatcatgagcgactataatacggcggtaggcctgttctatgtcggaaatatggtgcctgatttcctggggaccgttgagggagtcaaatggctggcgggttttagagataaacaggcgacctttaccggtgtttgggaacagagctttactctgtcagatgcccttgtagccgcaggcgttatggatcctgctgatattgcccatcagcgcaatatcgttctctgtaagaagcgtttgagccagggaactcttgcggccgctttcggagactctgcactatattatgagtgtgttgccgaaaaccagaaggcggtaaaggaaggcacgtcagaggcatatgtctaccggatgctcccgcttttcagtgatgagggaaatgaaccctggtttctgttctcgccgtctgcctttatgggcgtcaataatagcattagtaaagaaaaacaggatgcctgcaagcgtattctggaattactttcgacaccggaagggcaggccgctttaattgaggatatgggcggaggaatgtcctgccttactgattatcagcagcaggaggagttaattccactgggagtagaaacgtatgtggaatcaggatatgtatataatgtcttatttccaggtaaaaccgtggaatacctgggcgggtacgtgagaaatgtcatgtccggccaatgctcgctagaagaagccctgcagtcgattgaccaattctactatgaggggacggacgaaaattcctatgatttttctgttatcgggatggtaggtcatgatctgctgctggataatttcaatgtgcgccgcagggagacggaacttggcaattttatagcagactgcgtagcagaagcgtcaggagcgcccattgcagtggtcaatggcggcggaatccgggccagcttctatcagggggtggtctatggaggagatcttgcggtggtgtgtccttttaacaaccaaatcattgtattggaaatggatgggcaaactctgtgggatatgctggaaaacggcctgtctgtctgtacggaagagtttccaggcggccgatttttacaggtatccgggctccgctatacctttgacagcagcaaaccggccggcagcaggctggtaagcgtgacacttcccgatggtacggcactggatttggaggcagactgccaggtagctgtgacagactatatggccggttccagaacctacgcggaaggcaacggagacggctttacaatgcttaattattatgatgacgccaccccgaagggccgtgttgcgctggtgaaagaaaccgggctgctttatcgtgacgctttagcacagtattttgaacggcatcgggacagcgttgtggagaccatgctggaaggaagaatcagcgatttggcgcaggacaaataaaaagaccctgcgggcggaaaggagggggaggattgaacagacacaaaaaaagactgataagcatatcgtattgatttttgtccccggactgcttttgatgattgcgatcctgtgtacccttgcggtgataaactatcaaaaggtatcggaacgcacggtgaccaacatcagcggggtttacctgcgggaaatgacgacgcagttaagcagccatttccaaaccaacttaaacagccagttttctcagctccgcacgatcacaaacgccctgtcagagagtgacttaaaggatgaagaaagcctgaagcttttcctggcacgcgcgcagtcagacaatgatttcacacacatcgcgttcatcagcgataagggaatcgcctattcttcagaaggcgtcgtacctgcgatgtccaaaatctccggactggatcagttgctgtctggttctggagaactgatctcagtcaacgaaacgatctgggaaagcggcacgattctgctgggggctgccatgtctcccgtggagttcgaggactgccggctggtcgccgtgattattggaatccatacttctgatattggctcgagactgggaatggacagtaagacggcaacagattcctacaccaatatcgtgaccagaaacggggattttgtgatcaaaagcgcctcttcagaggaggttatatatggaagcaacttattgacggtctatgaacagcatgcagtctttgacaagggatatgattttccgtccttccacgcagccatcgatgcgggggaaagcgggctgacgctgctgactgtcggcacgcaccacgtgtacctttactatatgccaatccaggggacggactggtacatggtaaccagtatgtcatacgagaccgtcaacaaccagattgtctatttaagccagtttatggcgggagtaggcgcagggatcttttttgttgtattcgccactgtgataacgtttttccttctgtttagacgaagtgagaaacgcagcaatgagctgctgcggctggaaaaggaacgggcggaggcagccagccgtgcgaaaagcgacttcctgtctcagatgtctcatgaaatccgtactccgctcaacggcattatggggatggtggagcttgggaagaaccatattgatgaacccggccggatgcgtaactgcctggacaaaattacattttcgtccacacacctcctctccctgatcaatgatatcctggacatgtccaaaatcgagagcggaaaaatcgaactgcatccggagctgtttgacttgggaaagcttctgcgtgcattaacgacggtgttccatgtgcaggcgattaacaggcagatagactttcagatctttcttcggggagaggtcacggagtatctggttggcgatgcgcttcgcctgaaccagatactgacgaatctgctctccaacgctgtgaaatttaccccggcgcagggaagtgtcaacttgaacatagaaacgctgcgccgtgatgatcacaggatatggctgcgctttgaggttaaggacaccggccgcggaatcgcaccggagaatatccaccgtatatttgaaccttttacgcaggaaaacagcgggattgcccggaattatggcggcacaggacttggccttcccatcaccagaagctttacggaaatgatgggcggatccattactgtgtccagtgaggtggggacgggcagtgtctttaccgttgatttgccctttgactgtgcaccggatgacgtatacaaggacgcacaaccctgcggaagcggccagtcggttttggttgtgaatcagatagaagaactgaaaaataatctcactgatgtgctcagaaaggagaatttccgggtggattccgtatctgatgaggagacggccctgtgcaggatccatgcggcggtgcaaaatggtacgccctatgaattgtgttttgtaaagtgggacgtttgccaggagatgaagctgtttgcctcaaagattcgaagcgagtcagacaatccggatctgaagctcattctgacagggcaggaccaggacgatctggatgacatggctgctctatgtggtgccgatgcgactctgtgccgtccggtattccattcagatcttgcagtacttatgacggtactgacgggacagaatcaggaccagacgaaaccagagcagtcagctgttctggccggcaagcaggttctgctggcagaagataatgaaatcaatctggagattgccgctgcactgcttcaggatgcgggtgccattgttacttccacccaaaatggacaggaagcggttgaacggttttccgaagcgcgggagggcttttatgatctgatcctgatggatattcagatgccggtaatggatggctgcagtgcagcacaggcaatccgggcgcttccccgttcggatgcgaaatgcaccatcatcattgccatgacggccaattccttccgcgaggacattcagaaatgtctggacagcggcatgaatgcacatattgcaaagccatttatattgaatgacatcaccagtgcctacctggaagttttagggagctggaaactgcgaaaggcggatatagacagacatgttgatgtatgacagaatttatgaaattctaaaaaacagaattgtaagcagactgttaccaggaggatcaagccttccttcccgcgcaaagttatgtgtagagtttggaacctcggaaaaaaccgttcgccgggctttagccatgttagagaaagaggggcttattgaaacaacacagaggaaacgtcccacggtcagctttatgcaaaataccggtcacaggacgaccgtgctcgctcttgaaaaaatagataaagatatcacaagcgatgtactaaaagcaggcgtactgctgtgttacccggtgattaaaaaggggatcgcgctctgcagtcaggaagaccttcaaattccacgcagaatagtggatcatatggatagtgggaacgcagaggagttttggagactgtcaaaacttttttaccggttttttgttgccagaaatgagaattctttgattttacaggctgttgacagcctggggctttcagacctgagccccctgcgtgacgatatacagatcagaaccagatattatgagcaggtgcaggagtttatgaggacccttgagacgggaggtgttccagaacatgtccattttgatgatatgtcagatatctatgggatgacggagggaaataccccggcctttcaggccgctcccgattccgctgtgattcatggaaaaaagcagctggaaaaactgctggaggattcagaggtaagatattccgctgtgtatatggatattattggtctgattgctgccggcagctatcagcgggaagacaagcttccaacgcacgcggagcttcaaaaaatatatggcgtcagcgtagatactacgaccagagcgatacagattctgcgggaatggggtgttgtaaagacggttcgcggcgttggcatatttgtgactgcagatacggctgacattcaaaagattcatgtgccatctcatttaatcgcctgtcatgtccgccgttatctggatacgctggagtttttggaactgacaatagaaggagcggctgcctgtgccgctgcgcgcgttacgaagccggagctgctggcggtaaaagaaaaaatggaacgtttttggaatgaggagtatctgtatggacgcacgccggccattcttctggattttattacggaacatatcggaattaaggctctcagtaccatttatgagcttttgcagagaaatttccgaatcggccgcagcattccgggattactgaccacagaaaaaacaccggtgaactgcgaaattcatgaacaatgcatcgcggtgatcgatgctcttttagcaggcagccatgaacagttcacagaaaaaaacgtacagctgttcgggaatatctactgcctggtaaaggaggaatgcaggcggctcggatattttgagccggcagttgaggtttatgatggaacagcgttatggaaatcgtcctgaattggtaaaagaaaaaataaaggattttctttccgctttcaatgctttttcttcatgtatcatacctcagccggttcggaaacgagttccgatattcagacggcgtcagaccggtttcccgtttgtagatcttcataaaattatgactgtcatgatatcccagcttttgagcgatctctttgatggaaagggaagtttcggacaggtaatagttggcctgcgagattctctgattcagaatatactggtgcagggatacactgccgaggctcttaaatagtctggcgatatactgctcgttataattgaatttattagcgatatttttcagctttaattctttatcgagattttcgtcaatgaagtcaatgatactgttgtaaattcctgcattggattgagactgcgcttcctcgtcattcttcagaatggagatttggttgctgatttcgcacaggataagtgttgttaaatagtttacctccagaaagctgtagttggaacggatcgtatcttgaagctgtctcataaaaattgctattttctccgggtaaatcagggttccctggctggggataaagatttcatttacagcctccaaaaaaggaaagtccacattgcccaattctgtctttcggatttccgacggtggataaaaatgcagccagtaaaagtcgcatttattgttattataaccgcggcgcacgttattgggggcctcgtgcggatcgatcagcaaaaactggttttcgtgaatggaataagatacgcctctgtattttaaatacagaatacctctggtgaccacacataattcatacgtatcgtccagggggagtgcatcatgcctccagtctgaggagggagcctcgaatttgccggtatctctgcaggagaggggctgagaaatatttatgatatagccattttcatgaattttcattactgcctccttacgaactgaatacttactatgaattatataataattgcgatcatgagggaatggaaattagagacaaaaagtgtaaaaaacgtacctatatgcaagtaatgtacgttttttacactttttatatttttataacatttacacaaaaaatacaagttcttataattgattatataaattaaacacagtaaaggagaagatggtatgagaaaaaaatggtttggtttattggcggcaggtgtattattagtatcttgcatgatgacaggctgcggaagcaagacatctgagcctccggctgcatcaggagcagaaacagcagcaggagcgggagaaaagaaggaagagacagagaaaaaagatgtagaaaaaggggaagaggcaaagtcggatacggaatcgtcaggcagtgagaaagtgaaactggtcggtatgacctgggggagcaccgcaacaattgaaaactttacgaaggagtttttcgaacagaacccggaaatggcagcgaagtatgaagtggaatgggttgtaggaggaaagggagacgatgatgtgacagagcggatcaggctggctttgtcatcgggtgaatatgtagctgactttgtccagttaaattacacacaggtacccgaatttgcaagggaaggcgttcttaccgatgtcagcgatgctctgaagaagtacgaagcggatattgctgatggcggattacagttgatgcggtatgaagatgccacggttgcttttccatttgaattaaaaccgagagtatggttctaccgcagcgatatctttgaagaagcaggaatcgatgcggatgagattaagacgacggatgactttatagctgctggaaggaagctacaggaaaagttccctggaaaatatatctgcaatgttggttcttctgctcccggctacttattctacatggctttgagtggaaatggtgcaagatttacggatgaagatggaaattatatgatatcacaggatgaagggacgagaaaagtactggaagactatcggaagattgtggaatccggtgtctccatggatgtatctgactttacgacagactgggaagcagcattggcagacggaagtctggtaagctcattaagcgcctcctggctggctcaggattctttgcttccaacttatgcggcaggccaggaaggaaaatgggcatgcgcccagtggcctgaaatcggcggatctgtcggaggaagcgacgctggcggatcggtattcgtaattccatcattctctgagcataaggaagaggcgaaagaattgctggcggaaatgacactgagtgaggcaggtgacctctgtatctgggacagcatcagttccataccggtcaataaaaaggcactcgataacgagagaatgcaggtaccaaacaaattcttcggaaccagtgttgtggaagcaggcaagactgcagtttccaagatgagcgttttcaactattctcccaaggctcttgcagaaacagatattgtaatgccttactttgtaaaggcagttaatggagaactgtcaatcgacgaggctttgacctcggcagaaaaggatttaaagagccagctgggaaatgcttttgaataacagcggtatcgattcacagacaggagaaggaatgaagaaaaaaacaataatcccttacttatttatcacaccgtttctcattgcatttgtactgttttttgtataccctgctggctattctctctatttaagttttcttaaatataaggggtatggagaagccacctttgtcgggtttcaaaactataaagccctcctgacctatgccctgttctggaaatccctgggaaatacagcattttatttcctggcacactttgttcctgttatggccggtgcgtttttattcgcactggccatgcagtcgagctacattggcagggcgcagaaggtgataaagccggtgttgtttttgccgcaggtggttcctctggttgcgtctgctcttatttttaaaattattttttccaccaattccggagcacttaatcagattacggggctccatgtaaagtggctggaagacccggggcttcttaagtggccggtagtatttttgattatctggaggtctgtgggctggtttatggttatctttcttgcaggactgacgacaatcagcagtgatttgaatgaggctgcaacactggatggggcaaataactggcagcggatcacgaaaattacgattccgttgatgaaaccgatttttttatttgcgtttgtaaccgatgtcatcagttccttcaaaatctatacagaaccaaatgtcatgatggtggagacggggacgattccagtggatgcgcagcctgttatgaatataatcaccaatcatattaaaggagggaatttcggtatggcctcggccgcaggctggattctatttctgattatattggttgtttctctggcacagctgtttttgatgaagaataaggaggattgatgatgagcagagatatcaaaaaggttactcttcatatacttcttctattgttcgcagctgcggctgtggttccaattctgctcatgttcgttaattcatttaagacggggagtgaattggcgaaaaacgcatggggaattccatcattctggacattttccaattacacaagccttgtcagcttcaattcgggaatcttggttaggacatttttcaacagtgtttttgtttctgttgtctatactatgctgacgctgatcgtttccagcctggctgcgtttgcgttttccaaatacagctttagaggtaaaaatgtgatattcattttccttctggcaacaatgatgattccggtggagatcacgattccagcgatctacctaatgttcagcaaggtacatatgctgaatacctattctgtgcagatatttccgggaatcgcaaatgtattctgtctgttcatgctgaagcagtatatggacagcctgccggattctcttctggaagcggcaaggctggacggagcaggagatatcagtatttatcagaaggtggtgctgcctttggtgtccccggctatcggtgctctggcgattttgacatttcttggaaaatggaatgactatttatggccttccatgctcttaaccaaaacggaggtcatgccgatcatggtagtattgcctaccttaaataccgggaattcccagtggtctacaccgtgggaactggttatggcaggatgtgtgattgtgacactgccgttaattattgtattttttatttttcaagatcagtttatgagcagcgtcacaattggggctgtaaaagaatagaaaggacttaatagcttatgttgcagcatggaacgaagggaaattggaagaagtatataaataatccggtgcttggaggaaaatatggtacgtgtttcgatattgcagtattggatgaaggaacggaaatagccatgtatttttcatggaggcccaggaaaagcgtcgcggttgtaaagagtacggacggcattcactggtcggaaccggaaatttgtattgggcctaaaacatcagcggaaggctgggaggatgaactgaatcgcccgtctgttgtgaaaaaaggcaatacatattatatgtggtataccggtcagtacaaggcaggtgaagcggatggaacgtcccatattttctgtgcagtcagtacagatggaatccattttgaacgggtggatgataaaccggtattatatccgcaggaaccatgggagaaggcggctgttatgtgtccgagtgtactatgggatgaggaaaccagccagtataaaatgtggtactcagcgggtgaacagtatgaacctaatgcaattgggtatgccgagagcccggatggacttgtctggaagaaatttactggtaatccggttttctgtgccgatccggatacagagtgggagcagcataaggcggctggctgtcaggtattaaaaaaagatgaatactactacatgttttatattggataccataacgaggattatgcacagataggaatagcacgttcacgcagcggtatgacgggttgggagcgttcttcatataatccgatcatagcacccggtgaagatggatttgacagctgtgcgtgttataagccgtttgctgtgtttaaggatggaaaatggctgctttggtataatggcagaaacggaactttagagcagatcggcctggtaacgcatgacgggtatgattttgcattttaaacccgcttgagcggaacatgaataaaaccgaaaggaattactgggaaagatgattttggaaaaagtgctggaaacgtatgtagacagatttaacgcggaggatgaggagatataccgtcaggagattggtaacgatcaggcacttcactggctgaaaaaaaatattcctctgttcgaatgcccggatcccgatatagaggaaatatactatttcagatggtggacgtaccggaaacacgtaaaaaagactccagagggatttataatctcagaatttctgccggatgtaccatgggcaggcagctataattcgattaactgtgcagccggattccatattcgggagggaagatggctgagaaatggacggaaaatcatagaggattatattcgcttctggcttaagggaagcggagatattcggtcttacagtacgtggattgctgatgcggtatgggactactgcagtgtgctggaagactatggatttggtattgaactgctggaggagctgatctcgaattttgagtggtggacaaaagagcaccagagagagaacggcttatactggtcgattgatgaccgggatgccatggaattttccatcagtggatcaggattccggccgacgttaaactcatatctttatgcagatgctgttgccatatcccggctggcggaaaaagcaggaaaagatgatattgcctcaagatttgcgaaggaggcagagatgctgaaggaatgcgtgcagaaccatctctggaacggcgacttttttcaggtaattccggccaggattgattgcagagagaaacgtttcatcgaatgcagcacgctggattttaaaaaaataccgtcagacaggaatgtgaaagagttgatcggatacattccgtggtattttaatttgccggacgcaggatatgaaaaggcattttattatctgacacaggaggagaattttctgggaaaatcgggcctgcggaccgcggaccgatcccatccgcgatttgcatatgaggtacctcatgaatgcctgtggaatggaccagcctggccgtttgcgacgacgcaggcactggtggcattagcaaatctcctgcaaaactacagccaggagtttgtgtcaaagactgattactaccggattcttaagagttattcaaagagtcagcaccgtattacggaagagggaaaacgaattccctggattgatgaggaccaggatcccgagactggcgagtggattgccagaaccattttaaaggaggcaggctggaagccggaaaagggtggatacgagagaggaaaggattataatcattccatgtactgtgacttaatcataaccggcctgttgggaatcgatcctggtcaggaaccaccgaccgtaaatccgctgattccggaggagtgggaatattttctgctggaggggctggagattcatggaaagatttatacagtcctgtatgatagagatggaagccgctacaacaggggggaagggcttcagattttaacagaagaattgtttcaataaaaacggataacaggacggtgacaggatatcagatacgtaacataatatctggtatcctgtcatacctccgcccgctcacaattcactaaaaacctccgttcaaattcttccaccggcataggtttatagaaaataaatccctgtatgtaatcacatcccagtttctttaaaaactctacatattctttcgtttcaattccctcagcaaccgtcttcaaattcagttctttagcggtctcgacgatgtgtcggacgagaacgcgttctctgggatctgagtagttacaaaacagtgagcggtcaatcttcagggtcttcagctctgtagttgtcaggacgctgaatgaggaatagccgcttccgaaatcgtcaagagaacaggaaaatccgtaatgatacagctgtttcaccacgacctgtaccagatcgatctggtttaagacaatgctttcgagcagttcgaattcgatgcagtccttgggacagggcgctttttcgtagacctgcttgtacaggtcaaggaaataacggtaattaaacatgttgctggaaagattgacgctgattttgatcttcttattatactgctttatccagcggttgatggtgcggcatacatgctcgaacatgtacaggtccagatcgccgatcagaccgtttttttccagctccggcaaaaaatcacttactggaatcatgcctttttcaggattgatccagcgtaccagtgcttccgcttccgtgacctcccctgtgcgcagattgactttcggctggagataaagtttaaagtcttcatgttccagcgctggctggaaatcctgctccatgttgtaatttcccagattcgtatcattgtaagtcagaccgtatacttccatgtgtgagttgcgcagatggctttccgaactttccgtacggcagatatcggcattgtactgggcggtcaaaaagtccgggggatcgctgcccagcaggaagactccatagcccatatatacttttccgtactgctcgccatagggccagtcacggattctcgtattgatatcaatggtatagtggaaaatatcatcgtagtccttcgaaatatggaccaggaggagatagtagccggcatggatatgggcaatatattctccggggttcagccaggactcaacacaatcataaatcatggcggtcagccggtccccggcttcccgtccgaacatacggttgaaaatacgaaaccgtttgactttcatgctgatcagggcgtagtcgtcgggatttttactgcatatatcttcataacgtgcttttatccactgctcattttttaaatcagccatcgtgttatcctctgttttttctgactttttggaatcgttctgtctttgcaaaaagttacataatatgcttgcttaataacaactatatcatatttgtaacccatgggcaatgcagcacaccaaattttagcaaaaacatatcacgggatccgtctctgaacacttgcagcactcctctgaaatgattataatgtgtagagaagaacaggaggaaaacatgcgatgatagaagatgtgatcgattacaaccgtaaatttgtggctgaaaaaaactacgaaccctatgaaaccagcaagtatccggataaaaagctggcaatactgacctgcatggatacaaggctgacagagcttctccctgcggcgctgggaattcacagcggagatgccaagattattaagaatgcaggaggcgtgatcagccacccctatggaagtgcggtgcggagccttctggtggcggttctggaactgggtgtggaagagattatggtaattggccatacagactgcggcgtccagggcatggacggcaaaaaaatggtggagaagctgaaagcacgggggattccggaagagcatatcgatatcatacgaaagagcggaatcaatctggaacagtggctggggggatttgagtcggcaaaggaggcagtgaaggagtcggtagacagcctgaaaaaccatccattgatgccaaaggatcttgtgattcggggatttatgatggattctgtaacaggagagttaactgctctttgttagaaatatgacaaattttctgtagaacaggaatgcaggacgcattctcagtagaacttttttttaataagcggtatactgataaccatacgaaagacagaacaggagagaatgtcatatgaaggccgcaaagaaaatagatatgactcaggggtccatcatgaaacgggtgctgttatttgcgcttcccatctgtgtgggaaacgtgctgcagcagctgtacggtaccgtcgatacactggtaatcggcaatttctgcggttccgtatcgctggctgccgtgggcaccagcagccagccggtggagattctgctgtgcgtattcctggggctgggcacaggggtatccatcctcgtttcgcagtttaccggcaggggtgacatggaaagcctgaaagagatcggagcgacagccatatcctttttatttttgtgttccataccgctgacgatcatcgggcagttcgccggtccggcggttttgcggttcatgcaggtgccggatgatacgtgggaactggccaatgcttatatcagcatcatttttttcggaactctggggaatatgggatacaatatgaatgcgggaatcctgaggggaatgggagacagcaacgcgtctctgctgtttttgattgtatcctgtgttgtgaacattgttctggatctcctgtttgtggcaggtatgggcatggatgtgcccggtgcggcgctggcgactaccatagccatgtactgctcctggctgttcagcatcgtctacatccgtaaaaagtatccggagttcggctttacgtatctgccgcaccggatgaacaggcggatgctgggaagtattgtggcgatcggacttccgctggggctgaacagctcgatctattccgtgggccatattctgatgcagtctctgattaatctgcagggctccgtatttattgccgcctgttcggtgagcagcaaggtcacgggaattgccaacgtggcgatcacctcgttatcctcggcggccacgacgttctcaggccagaacctgggagcggggaattacgtctatttaaagaaaggcgggatacggattccgctgttttcaggtctcattacctgcatcgcagggctggtcgtgacgttttactgccgcccgcttctggaactctttaccagggaggcggaggttctcgacattgcggtccggtatattcggattgtcctgccgttcacgtgggcctatgcggtctttaacggcatcatcagcttcgtgaacggtatgggggaggtccgatttccgacggtggtcaacctcctgatgctgtgggccgtgcggattccatgtgcctggctgattaccagctatatagacggcggctatgtgatggcctgtctgcccatcagttttgtattcggaatgctctgcatgttcagctatttcttctcgaaaaactggaagaagatcggaaaaatggcggcggagcagcagggcagactatgaaatactgaaaagcaatccgtttacggcttccccagatagtcccgttcaaattcctccacagggattggcctgctgaatagatacccctggaacagatcgattccgcaggcacgcaggaccgcatactgctcttcattctcgattccctctgccaccatgcggattcccagcttgaggcagacttcggaaatggattccacgatcgcccggttccgggaattcgtggtgatgtggtctaccattctcttatctaaattcagcgcatcaaagctaacttcagacatgagagcgacattggcacactccgtaccgaaatcatcgagtgtaacagtaaaaccggtgctttgcagttctgcgatcagctgtttgatatcaatcgtttcttcattgcggaccttttccgtgatctctatctccagataatttgccggaataccgtactggttacagatatccaggagccgtctggaaagctctgcttcccgcagtgtatgaagtgagaagttgacggaaaccgggaaaatctgtctgccctgatcctgccatgacttaagtctggagcacacgaaccggaaaacatagaaatcgatgaggctgacggtatggaattcctccagcaggggaagaaattcaccgggcgtaataaggacaccgggctgcggcgtatagcggataagcgcttcacagccgacgatcatacggctctcagatgaaatcttaggctgaaaataaacgagaaaatgattttcagcaatctctttctgcagggtatcggaattggataaatgctgcaacagctggtcgctgcagcggcggtaccggcgggaaacgggattgatgcggtaaaatgctttcttgttttcgtacatctttgcatcggccacggcaataatccggtcgatattatcgatgtgctccctccactggcagccgatggcggcctggcagtccgagtcatttttaaatttttccttcagatcacgtacctgattctggaagacctcctgggggattccgggacagatgatgacaaattcatccccgccgatccgatagaaatctgcctgtgtaaacgcggccctgatccgtttggcacactcgatcagaacgcggtctccggactcatgaccgtaatgatcattgatatccttgagcccgttgacatccagatagacgattcctacaggctggttggagccggccagtgccccagtatcgacgatgtacttattcctgttataaaaatcagtcagtttatcgtagtagcttaaatgagtcagcagctgtttgttttccgcatggtttcttgccagcatgaggaagtagcacagcgtttgcagcagaggactgatattctgaagtcgggcaggggacggattatcgactcctaaatacccgattaatgtgccatcctgttccatgggtgcagcagccaggctggtaatcgactgggcatggagaatctggtattcttccgggaagggttccctgatctcctccagatcttcaatgatcatacattcttttttatcaaaatatgtgatccagcgggtgatcagattgagcggaagatcctgcagcatttcccgctgcggttccacaccatcggtacaccattcatagtcattgtacattttaccatgtcttatgtagataatatatgcccggtcggcagagagaaagctgccaaggcgctctaaaacctgggaaatggcggtgtcaatgtcttctgactgatacagtgtctggacgcatttcgtaatcatctcattggcttccagcgtaagcttaagctgaagcttttctttttcggattctgtggtatcgaaggcaagctccattcgggcggtccggccctcccattggatcaggcggtcttttaaaatgtaatgacgccgggtcagcggattggtgtattcccatgtataggtttccccctcttttaagatggaggaggtgcagaattcacacggggaatcgaatccctgcaggacctggtagcatttgcggctgtccagggcatcgatgtgaaacgtttccatgcctgctttattaacgaagagcagagtgtgatcttcgatatccgagacgtagaccagttcagaaatctcattcatgggtccgagaagactgtccaccatatgggagaggtgttccttcttttttctgctgtcctcctccgtccgttgaagctctctctggcgtctcgcctgaccggcgctgtaaaggcagaagaggaagactaccagaagaaagaagcagttcagcagaagcaggcttttttcagccagaagctcccgattttcggaaaactgttccgctgccagcacggcccggtcggccagatcgaaataggattcactgtcttcaaagagcttctcggtatctccgccggctctgacgagataaatctcttccttcagaagattccagtctgtctccatccggagtatcagatcctgaaaatcactgctgttcatgcggatcagcccatagacgcctttccctgactgcagttcctccagtattccgtctaacttttcgatcagcaagtcattgggaatcccatttaattcttctttcacgagacgctgggtcgcgccgcgaacaatgccggcgtagttgatcaccttcgcattgccctgtaaattgtgaaagcataagatcgaaaaggtgctggagagaatgagggctatcgccaaaataacaggtaatattttcttttgcatgggtgcctccgggttcagtgtcattgtaatttcttttaactttaagagtaccatatttcgcatgccgttgcaagaaagaaagagcagccggaccacttttgccgctgtcttccatgttgtagccatatgtgcgctgtgatagaatagaagcagcaaagtgaagtcgtacggaagaagggggtacaccgtggatttattttatcatgagacgtttacacagaatgagcagatgccgatgcagcttcgcctgcacagggggcagatcaattatatgattctggagcactggcaccggagtatcgagatcgactatctgctggactgtgaagcagatttttatattaacggaaaaaagaagcaggtggctgccggaagtattacgctgatcaatagcggggatattcacgccctggagcccagggaagtaccggtggatacggaagacaaaattcatgggatttccctgttcatatcctatgaattcctgaagaagatatgtccggagatcgatcagatcaccttcgaactggaggggcaggaagagcggctgaaggagcttaaggaggtttttaacagcctgattcgtctggaactggcccctcctgaggaatacggttacttaaagaaaaatgcgatgctccattccctgatgtatcttcttcttacatattttaaggagccgaggaaccagtcgtccgtaaagagccagaagtatattgacagactgcgggtggttctggattatgtggaggagaattaccgggaaccgctgacgctgcagggagtagcggaccatttcagcgtgtccatggaatatctggcgagaattttaaagaagtacacgggcaacacgtttaagacccatctgaatcaggtccgtgtcagcaaggcgttccgggacctgctggagacggattactccgtactggaaatagccatgcgcaatggattttcggatacgcggtctttgatcaatgtctttcgtgacacgtacggtatgacgccttcccagtaccggaaaaagaacgccaggagagaagcggcaaaggaagcggcctctgcggaatacccgccgcatatcagggtggtggacgcgccgtaaggtgcggatgaatgtccggatgaatgtccggatgaattcctctttttacaaaatgtcaagaaacgtatctgttttcaataaattatgtaaagatttcacaaagggaatccgatacaataggaacatgagacgcgtccttaacaaaaaaagagaggttatttcaaaatggagaaaatttcgttaaaagaacgattcagttatggattgggagatttggcctgcaatttaatgtttcagctgattacggcgtatctgatgtttttctataccgatgtggcgggaatcggactgggagcgatcagtctgattatgctggttgccagagtggtggacgcggtcacggacccgatgatgggggtaatcatcgataagacccacaccagatgggggaaggcaaggccgtatgtactttggatggcggttcccttcggaatcatcagcgcatccatgttcctggtaccgaatttcggcggaaccggaaagtttatctatgccctgattacctatattctgttctgtattgtgtatacagccctcaatattccctacagcaccatgctgtcctgtatgaccgatgatgtctccgacaggctttcctttaatatgttcaaatcactcggagccagccttggcggttttgtcgtcatgggtgcgaccctgacgctggttgccgtgttcggacagggagaccagaaaaagggcttcttcggaaccgtggttctctatgcggttgtgggtatcctccttttgatgatctgctttaaaaatacgaaagagcggatcataccggagacggaaaaggattccgtgacgggcgccataaaggttgccgtaaagaataaatactggcttctgctctgcggaatcacgttttttacctttgcaggcatgattctgaaaaatcagtcgaccatgtactatgcgaaatattacttaaataatgagggaattgcctcccttctgatgacgatcccgaccctgctttccttcctgatggcatttataatcccggctcttgcaaagaaaatcggaaaacgaaactgtatactgtccggcggactggtgaccatcgcaggaaaccttttggttctgatatccaaaacaaatctggcgggaattctggccggtacggtcttatgcggaattggcctgggccttggaatgggagtcacatttgtcatgggagcggagacggttgattactccgagtggcagacgggaaggcgtccgcagggaattatgactgccctcatgggcttcggtgtaaagctgagcatggcgatgtccggcgtggtaggtgcccaaatcctgaaatttggcggatatgtggaaaactcggtacagacggaaggcgcgcttcgcgccattcaaatgaattttatctggattcctgtcatttttttcattgtagtggttatactcagtctgttctatgacctggacaaaaaatatgaaaaaattctggccgagatccatgaaaggagaaattaatggaaaagaaatggagtcaggaggaaaaggatggataccgtctcattcacaatgaaggtggaaaggatcttggaatttcttccggcagcagggtggcgattctatcagaggatggctatgcattcaaagactttcttggaacgggaaagatcgtaccgtatgaggactggagactgcctgccggggagcgggcggctgatttagcctccaggctctcgatcgaggatatcgccggtctgatgctttacagcgctcaccagctgatccctgcaaaggggccgctggcggcggctttcggaggcacgtacgatgggaaagccttcgaggagagcggggcgagtccgtgggatttgacagaccagcagaaggaatttatcgtgaaagaccgggtgcgccacgtacttattatgaagcttcaggacacggagactgctgtcagatggaacaataaacttcaggcgctggcggaaaacaccggctttggaatacctgccaacaacagttctgacccgaggcacggggcgggctcttccgcggagtatatgggcgtaacgggagaacccatatccaaatgggcgaacgggatcggtctgacggctgcctttgagccggaggcggtaagagaattcggggagatcggcgcagcggaataccgggcgctggggatcacgacggcattgtctccgcagattgatctggccacggagccgagatggatgcggtttgcggacaccttcggggaacatacggagctgaccgtgaaaatgacgagggcttactgtgagggcttccagaccacgaagaacagcccggatggctggggagacgagagtgtcaatacgatggtcaagcatttcccgggagggggaccctgtgaggccggccgcgatggacattacgcctacggaaagtatgcggtatatcccggcggtaagtttgaagagcatttaaggccgtttacagagggcgctttctctctgaagggaggtacgaagacggccagcgccgtgatgccttactataccatttcctacggcgtggatcagacctacggtgaaaatgtcggaaattccttcagcaaatatattgtaaatgacctgcttcgcgggcgccttggctatgacggcgtcgtgtgtacagactggggcattacccacgatatgggaaaaacggaagaggagtttgcgggaaaatgctggggcgtggaagggctcacagaggcggaacgccatttaaaggccctggaggccggcgtggatcagttcggcggaaacaacgatgccggcccggtgctggaggcttaccggctgggatgcgaaaagtacggggaagaggccatgcgcagccgttttgaacggtccgcagccaggctgcttctgaatatgttccgtaccggtttgttcgaaaatccatatctggatatggaacattcctgccaggtggtaggctgcagagaattttcggaaaaaggctacctctcccagctgaaatcggtcacgcttttgaagaaccggggcggagtgctgccgcttgcggagcaaatcaaggtgtatgttccgagacgccatatccgcccatacttaaattttatgagctccatgacaccggatgtatctgtggaaccagccggaaaaggagccgctgccgattactttgtggtggtggatacgccggaagaggctgacgctgcggtctgcttcatcgaatcgcccatttccgtggggtatgatccggaagacaggaagcggggatgcagcgggtatgtcccggtcacgcttcagtacaggccctacgaggcgaaacaggcaaggctgcacagtctggcgggaggagatccgctggagacttccgatgaccggagctatcgcggaaaatggaacactgcggccaatgaggaagatttagatctggtcattgaaacgaaaaagcgtatggcagagcggccggtgatcgtatcggtaaacttaaaaaaccccatggtaatggcggagctggagccgtatgcagacgcggttttagtggattacggggtatcaccccaggcggtgctggatgtgatcacaggcagatttaccccctgcggcctgcttccgcttcagatgccggcagacatggataccgtggagcggcaggcggaggatgaggcattcgatatggaatgttataaggacagcgagggccatatttatgaatttggattcggtatgaattatgacggcgtaatagaagacgtgagaaccgaaaaatatggaagacagagcagaaggaggacgaaataatggcaaagcagtttctgtacgacagccttccggttgtggagacgaaggcagggaaactcagagggtatcaatgggaaggaacctatattttcaagggaatccgatatgcgagggcgaaccgttttcagctgcctgaggaggtggaaccctgggagggagtgaaggaggccgcctcctacggcttcgtgtgcccgatgctgacaagggatcatccacagggcgaacttctcgttccccaccgctactggccgcaggatgaagactgcttaagcttaaacatctggagtcagtctctggaccggagcgcgaaaaaaccggtgatgttctggatacacggcggggcattttccatgggaagctccatcgaacagaaggcgtataacggggaaaatatgagcagatacggggatgtggtggttgtcaccgtgaaccacagactgaatatcctgggctatctcgatttgtcgccctacggggaacgatatgcgggttccgccaatgcgggccaggcggatctggtggcagcccttaagtgggtcagggacaacatagaggcgtttggaggagatccggacaatgtgaccatcttcgggcagtcgggcggcggtatgaaggtaagcggcctgatgcagacgccggaagctgacggactgtttcaccgggcgatgattatgagcggtgtggcgggagacgttcttccgtattctaccggagattccagacctttgatccaggcaatgcttaaggaactgggccttgcggagcaggaagccggacggctggagacggtaccgtattatgatctggcagcggcctataaccgggtaagtccggcgattgccagagcgggcggttatattgggtgcacgcccagaccggatgatttctacaaaggagaagggccggcggttgggtttacggaccatgcgaagaccataccggtgatggtcggtactgttttcggagagttcgcaatgatgccgctgccattcaataaggagacgatatcagaggcggaactggatgaaattttagataaacggttccaggggcatgggaaggagctgaaggctgtcttcgccgaagcatatccgggaaagagcccggtggacttactcacgctggataccattttccgcgggccgacgaaagaatttgtccgttccctggccgcggcgggaggaagtgtctattcctatttattcgcactggaattcccataccagaatcagaagacggcatggcactgttccgatattccatttgttttccacaatacggaactggttccggttgccaatataccggaggtgtccgaccggctggaggagcagatgttcggcgctgttatggccttcgcccgaagcggaaaaccggaatacggcgcactccctcagtggcccgcttcccgggaggacgacgaggcgacgatgatctttgaccgcgtctgcgaggttcgtcataaccacgacaaccgattgctgaagctgcacgcagagtcttcgccgaagttcgacctggcggctgtgatggcggaaatgggagatgagattcagcattaaaggaacgttcaaaccacattggtagtgttagtaccaatgtggttttttgcataaattcaaaaaagattaccaatttgttggaaaatgtagtagaatatgagaaaagcagtcagaaaaggagaattaaaatggcattttattatgaggaaccgtccagaacattcagtgagtaccttctggttccgggctattcatcgacaaagtgtattcctgcagaagtgaatttgaggacccctctggtcagattcaaaaagggggaggagccggcactgcatattaacattcccatggtttccgcgatcatgcagtcggtgtcggacgacagattagctgtcgctctcgcacaggagggcggcctgtcttttatttatggatcccagactgttgccgagcaggcagcgatggtaaaccgggtgaaacgataccgggccggttttgtagtaagtgattccaatgtatctcccgagatgacgctggaggatgtgctttcccttactgagcggacaggccattcgacgattgccgttacagatgatggcggacctggcggcagactgctgggaatcgtgaccaataaggattaccgcgtcagccgtatgacgcctgatacaaaggtaaaggagtttatgactcagattggtgatcttgtatacgcagacgaagataccaccttaaaggaagccaacgatattatctgggaacacaagattaactgccttcctcttgtaaataaagaagggcggctggtatatctggtattccgcaaggattatgacagccataagaaaaatgagaacgagctgatcgacagctccaaacgctacatggtgggcgccggcatcaacaccagagattatgaggagcgtgttcccgcacttctggaagcaggggcggatgtgctctgcatcgacagttcggaaggcttttccgagtggcagaaaattaccattgattatatccggaagaattacggacagagtgtaaaagtgggcgccggcaacgtggtggatgcggaaggcttccgtttcctggccgatgccggagcggattttgtcaaggttggaatcggcggcggagcaatctgcattacccgtgaacagaagggcatcggaaggggacaggccacctctctgatcgaggtggcaaaggccagagacgcctactacgaggagacgggagtctatgtgccgatctgttccgacggcggcattgttcacgactaccacgtgactctggccctggccatgggagctgacttcgtaatgctgggcagatactttgccagatttgatgagagccctaccaagagagtcaatgtcaacggaagctacatgaaagagtactggggcgaaggaagcgcaagggcaagaaactggcagcggtatgatatgggcggagagaagaagctttctttcgaagagggcgtggattcctttgtaccgtatgcaggcagcttaaaggataacgtgaatcttaccttaagcaaagtgcgctcaaccatgtgcaactgcggcgcgctgacgattccggagctgcagagcaaagcaaagattacgctggtttcctcaaccagtattgttgagggcggcgcacatgatgtcatgctgagagattcaaaataagactgattgacgggagcggtttggatggaatatttcaaagcatccagggaacatggagaactgattttcaatctggtacaggatacaattaacgcggtctatccgcggtattacccgaaaccggttgtggagtttttttgcggcattcacagcagagacaatattaaccgtgatatagaggaaggctgtgtgcgtgtgctgtggaaagacggccggctggttggaaccggaagccgtaaaggcaaccatatcaccagagttttcgttgctccggaattacagggacaggggtgcggcagctgtatcatggagaagctgaaagatgaaatcgcacaggaatttcgtttcatatgcctggatgcctctctgcctgcggttcatttttatgaaaatatgggatataaaaccgtggggcacggaagaattgaggttggaaataatgccatactgatctatgagatgatggaaaaacaattatgcggccgaaacagcgcggatatcgattgagcagcacgtatgatataaacgatccataagcagggcggcgggtggaaaatgcccgccgccctacactataataccaggtcctgtaaacccgtgattttacagcctttctgttcgtaatagcgtatcatttcgtcaatctttctcttatcatagctggtaatgcagtcggacaggacatagactccgtaatttgctttgcataagttgtaacacgtcgacttaacgcaggcggctgcatcagctcctgctatgtagaattcacacagttcatttgttcggataaagtctgtaaattcttcacagctcaatgcgttccctttatattttgtaaaaatatttttagacaccacgttcagatctgatgccaattctgccccataggtattgggcttaaaggttctcgtgcccgctgataaattctcatgccttatataaacaacgggaatcatatgactgactgcccagtcaatcgcctgattgatattgccgatgatgtccttgtaattctttgtaatatcattttgaatgtcaataattaccaaagcttttttctgcattgtgtgtcctcctgacaggtagattatttagctgcttttctattataaccggcaattgttgacaacagtatggcagcaatctattatgataaaaataaattttggaaggcggacagttgatgaagatagacaggcttgtcagcattattatggtgctccttgacaaaaagcgtgtgggcgcacaggagttagccgatatgtttgaagtttcaccccgcacaatttaccgcgacatagatgcgatcaacatggcagggattcctgtccgggggacatcgggagtgggcggcggctttgagatcatggaaaattacaagattgacagaaatgtgttctcggcagccgatctttcggctattctgatggggctttccagtctttccaatatgatacggggagaggaactggtaaatgcccttgcaaaagtaaagagttttattcctgctgacagggcaaaggatattgaattgaagtctaatcagatagccgtcgatttgactccctggatgggcagcaggaatacacagccttatctggaaatgatcaaaacagctttacaggagagcaggcttctttcctttgaatatgaagaccgccacggaaataaaaccacacggaccgcagaaccgtatcagcttgtattgaaaggcagtcactggtattggcaggggtactgccataaacgaaatgatttccgcttatttaagctgtcccgcatatcaaacctgcatatacaggatgaattttttacaccgggggaatatcagaaaccacagctggaattcgcagatattctgtcctcgatgcagaccagaatcaaaatacgtattcacaaatccgtcagggaaagagtactggattactgcacggatgaacagatttttccggatggcgatgagcattacattgtcagctttcctttcattgagaacgattattactacaatattcttttcagttttggcgataaatgcgagtgtctggagccgttacacatccgcacggagatgaggcgccgaatacaggatatcgctgccatatacgagggcggaaaataatatgtcagaaaaacgtgaaaatccacttgactatagggttaccatatagtttatgctaggaagatgcgagtaaatcgttaagacattttcatcaggaggaaacaggttttatatgaaattaattatccgctacttaaaaaactacaagaaaatgtttctgcttaatgtagtctccgtactgggctttgcgctagtggagctgggaatcccgacgattgtggcacagatgatcgacaacggagtaagccgggggaatccggcctacatatggaagatggggctggtgatcgccgcgatttcgtttgccggggtggcaggcactattttgctgggctactgctgcgcgtatctctcgacttccgtgaccagagacatacgcaacgacatatttaagaaaacccaggaattctcccacagtgaattccatgagttcggcattgcgtccctgattaccagaacgggcaacgatgcatttcagattcagatgttcatgaatatactgctgaggaccgctcttatgacgccggttatgatgataggaagtatttttctggttctgagggcttcactcagtctttctgtcgttattctggcaacgattccgctgattgtgggcggagtgattctggtggcgagaatttcggaaccgatcagcgagcgccagcagtcctctctggaagacataaaccggatttccaaggagaacttaagcggtatccgggtaattcgtgcgtttaccaacgatgattatgagaagcagcgctttgacggcgctaattccagctatatggggaattccaaaaaactgtttaagctgatgtccgtgactcagccggttttctttcttctgatgaatctggccggtatggtgatctactggattgccagtatcatgttaagtcagggaaccttacagatcggggagctggtggcatttatggactacctgttccatgtgatgttctccatcatgctgttctgtctggtcttcatgatgtatccgaaggctgcagtcagcgccgggcgtattcagaaaatatttgacgcggagccgtcgattaaaaatcctgagacgaatgcccaatcagtggagcatattgatgaaatagtgtttgaccatgtggatttcgtctatccggatggcgaggaagcggtgcttaaggacgtatcattctcggtgaagaggggagagacaatcgcgtttatcggcagtaccggatcgggaaaaagtacgttgattaacctgattcccagggcttacgatgtcagcgcgggccgcgtgctgatgaatggaaaagacatccggacgtatgacttggagagcctgcggcgcgccattggctttatccctcagaaagcaatgctgttttccgggaccattgcggataatctgcgtttcgggaaagaggatgccacgatggaggacctggttcaggcggcaaagactgcgcaggcatacgattttatcatggaaaagggcgggtttgacgagcagattacggagagtgcaaccaacgtttccggcggccagcgccagcgtctgtccattgcgagggcgctgatcagaaaaccggatgtctatgtgtttgacgattcgttttcagccctggattttaagacggatgcgaagctgcgccgtatgctgaagaaagagacggggaatgccatcgtgatggtagtggcacagcgtatttccagtattatggatgccgatcagatcattgttttgaatgaaggaagtatcgtgggaacaggaacccataaggaactgctgaacaactgccgcatttaccgtgagattgcattatcccagttaagtgaggaggaattatcccgtgcgtaaaaaaataaaagacattggaaggatgctggggaaactgaagccgtttctggcgccttacagttttcagctttttgtttcagtttttatgattgtgataagtattgcagcgattacggccgctccgcggatcgaaggcatgattaccagccggctggccgcggacgtggcagggctggcctccggtgcggcgggcgcccgcattcattttgaggtgatccgcaatatcctgctggtacttctgtctatctatctgattaagacggtttcccagatcgtgggtgcattctgtctgactaattcgattcagaatgccatgcatgatttgcggaatgaggttcagaacaagatccgccgcctgcctgtccggtattttgataccaacagcttcggcgatgtcttaagccgggtcaccaacgatgtggaggcggtctccaatgcgctccagcagagcttttcccaggtgatcagcggaatccttactctggttctggctctctggatgatgttttccatcaatcgggtgatggcctgtatcgcatgtttgatcattcctgtgggagcccttattacacgcggcatcgtaaagatcagccagagccagtttaaggcccagcaggactctctcggagatatgaacggagcaattacggagctgtacaccggctacaatgagattctgctgttcgggcagcaggagcagtccaggagacagtttgagacggtcaatgacagcctgcagaaacatgcctttaaggcacagtttctctcgtcacttatgagccccctgatctccctgaccacgtatctgagcattgggatcattgcggtgatcggctgttttgccatactggccggtacgctgtcagtaggtaatctgcaggcgttcatccgttatatctggcaggtcaatgatccgctgacccaggtgtcccagctgtccgcccagatacaggctgcatttgcaggccttaagcgtattttcgaaatcctggatgaaccggaggaaacagaatctgctcccgcgggccttcttccggggcctgcaaagggcgaggttaccttcgaacacgtcagcttctcctatggggacacaccggtcatccgggacttcaatgttacggttaagagtggccagatggtggccatcgtaggccctacaggggcgggaaagactacgctgatcaatctgctgcttcggttctatgatgtaaacagcggacggattctcgttgatggtgtggatatccgcgatatgaaccgggaagatctgcggtccatgttcggtatggtacttcaggatacctggctgttctccggaacgatttttgataacatccgttacggtaatctgtcggccagaaaagatgaggtgatcgatgccgcgaagatggccaatgttcatcattttatccgtactctgcctcagggctataacatggtgattaacgaggagggaagcaacatttcccagggcgagaagcagcttctgacgattgccagggctattttaaagaatccgcagattatgattctggatgaagccacttcctcggtggatacccgtctggagaagatgctgcagagcgccatgtatacagttttaaaagaccggaccagtttcgtcatcgcccaccggctttctactattaaaaacgcggatttaattctcgttctcagagatggggatatcgcggagatggggaaccatgaaagcctgatggcacagaacggtttctacagccagctctacaattcccagtttgcgtggggcgcggaggaagcataaaaggaagactgcaaaaacttcttgacttaaagtccacttcaacaagtataataaaaaagtggctgcggcttatgcgaagaattctgaggggaaatcccctctgaaacgtcagaaagaagagcatgccatgagcagaaccttatatgtggaaggggaacagagaaaaggagagtgtgggatatggtatacaaagagtttcaggatttaaagctgtctgccctcgggatgggggccatgcgccttccggtaacggaaggagatgattccgtcattgacgaggcagccacagcagaaatggtcgcatatgcgatggaaaagggaatcaactattttgatactgcctggggctatcacggcggacattccgaggaagtgatgggaagagtactcagcaggtatccaagggagagtttttatctggcgacgaaatttccgggatacgacctttccaatatggatcaggtggaggcaatttttgagaagcagcttgagaaatgtggtgtggaatactttgatttttacctgttccacaacgtatgtgagatgaatatagatgcatacctggacgaaaaatatggaatttttcagtatctgttaaaacagaaggaggcggggagaatccgtcatctgggattttcggcacacggaagctgcgaggtgatgaagcgttttctggaggcatacggcagtgagatggaattctgccagattcagctcaattatctggactggtccttccagagcgcggaggctaaaatggaactgctgcgcagctgcggtctgcctgtctgggttatggaaccgctgcgcggcggaaagctggcggttttgtccggcgaagcgatggagagactgaatcaattccgtcctgaagaaaaggccccggcatgggcgttccgattcctgcagtctgttccgggagtcacgatgattctttcgggcatgtccgatttcagacagcttcaggaaaatatacatacttttgaagaggataagccgcttcaaaaagaggagatggacacagttctggcaattgccgatgagatgcttaaaaagtctgctctgccgtgtacggcctgccgctactgtgtaagccactgcccgaagcagctggatattccggccttactggagctgtacaatgagcattgctttaccggcggcggttttcttgctccgatggcgttaatggcggtgccggaggataaacatcccgacgcctgtattggctgccgcagctgtgaggctgtatgtccgcagcagattaagatatcagaggctatggcggattttgccgcgaagctgaattcctgatttcgaatatgaaaacagaaggtctgcacggtccatgcaggccttctgttgtttagaaaagaaagttttaagctgatattataggctggccttttccaaaagtcaaactcctgagttgattttctgttactgtaatggtataattaaacaacgtatgagttttttttgaatgcttaatatatggcatacgatcctagtttttaccataaatatctggtatatgtaccaagttgtcaggggaatgcaaaacccccttttcacaggagaaaggaggcggaacagtgacgaaatacaaaaatggacgggaaaagcagaatgagatgacatatacctatatgccggttttaaaaatcatcattctgctgtgtatcctgacaatcataattatggcagcaggcggtctggctatcgcatttcagagaatgaagaaagaagctgccgccgcccatgaaaatgttacggcccaggtttccaaccgggtggaggaatcattaaaattactggaatccatggccattcagccggagttctatgatccgtcggtccctcctttggagaaggtggcaaaactggaccggataacggaaacttacggttatatcatgatctgttttgtggattcggatattaatgtctatacaataggggaagagccggccagccttgccagcagagagtatatgcagcagctgttttccactggccagccgcagattacagacagttttgcagcaggggcagatgggataactttaaactatacggtagcttaccccttaaaacagaacggggaaatcacaggctgtcttttctgcgccatttattttgatgaaatcgtgaatattttaaaggaggcgtccggtttcagcggtacccaggccgtgctgatcggttccagaggccagattatgtcatcgacgaataatctgcagtacggggaaccgtatctggatcacgtacgtgaagcgaaaaatctggggattacgacggatcagctggaaaccgaactgttagccaagcgtccgggagcatactggagtatcagacaggggcgcctttgctatacgatttacagcaatgtgaagaacacgaactgggatttgctgacggtgatagaattttgggatgtctataagacacaggtaccggcctatctggtaatcagtgtttttcttctgctgctgtgtgcgtttgctgtcagactgacgaagcggtttgtgaacgagcagaagcaggcggttaatatgctggtacactccattgaagagctggaagaaaagatctatcagaacgaacggcctgacaatgtagactttaaagaaattatccggctgaccagcaatgggctgtctgatggtctgacaggcgtagtcacgcggtctgtatttttcaaacaggcggaagcacagttagataaggtgccggaggaacggctcgttgccctgtgctttgtggatcttgataatttaaagaaactgaatgatacgcatggccatgcggtgggagatacggcgctcaaaagcatcggttatattctcagggaatatgagaagaagtatgacggcgttgtaggacggtacggaggagatgagtttgtactgctgcttactgatatcgacgatgagaaggaactgaaacgggttatggaatctcttgtgctaaggcttcattccgatatcggtacaggcggaattccgctgccgatacagtgcagtgtcggagttgcggtaagacagccgggagagaagctggatgaaatgatcgcccacgcagacgaagccctgtattttgtgaagcagaatggtaagggatattataaaatttatcaggattgagggagcagatgaagaggatcattaaaagaaggcggatcatctatttttttgtgcttacattattccttttgatttcggcagtcttcggtctggaaactcagagcaggtacgcagaggagcggaaggcagatgccggaagcattctggaattatacagggaaaatatcgttctggttatgagggaacagctgaattacgctcagggactggttggcctggcatccgggaccatgaaggattcggagtggtttcagtggaaagccgaagaactcatggccatggaaggcgtcagcagtattcttgtatttgagggagacacggtttatagagcatttcctgaatgtgtacaggaagttatggcgggcagaaatctaaaggatctttcttatctttataccctggcaaaggtagtaaaagaaccggtggtagagggaccggtcatcatggaggggacgggcgagacggtattcctgttccttcagccggtactggagggcagggcttaccagggagaaattgcccttgcactgtctgaagaatacgtaaaagagaagatgaatctggaaagcctgtatcagctgggatacgaatactacttatggaaggtgaacagtcaggat
